United States Patent Application Publication US 2004/0031072 A1 - sequence listing, part 43

SEQ ID NO: 276586 - protein, 44 aa, Glycine max
  Clone ID: PAT_MRT3847_91777C.1.pep
CLHDGVHINCIPCITSHEKPSAASYAYCTIIRTSSTLTLSTMPT

SEQ ID NO: 276587 - protein, 37 aa, Glycine max
  Clone ID: PAT_MRT3847_91778C.1.pep
PKLPSFCLGTTTNPQIQYSNVELTHCTNNCQQFLLFT

SEQ ID NO: 276588 - protein, 57 aa, Glycine max
  unsure (1)..(57): unsure at all Xaa locations
  Clone ID: PAT_MRT3847_91779C.1.pep
AYIIXIVTSVXSFVLTGLDLPIFCXVLLXLKPKVQFIXEFVCVKMSYGLIPLXLFLX

SEQ ID NO: 276589 - protein, 37 aa, Glycine max
  Clone ID: PAT_MRT3847_9177C.1.pep
TNVLFDTPCKVNSHLITNVCTYALSSNKYYYFIHLMG

SEQ ID NO: 276590 - protein, 65 aa, Glycine max
  unsure (1)..(65): unsure at all Xaa locations
  Clone ID: PAT_MRT3847_91780C.1.pep
XYXYSSKCRXXYLXXTXIXLITXXXXXXXYXSSXGXXECLAXGPGSNLHPXGXPXTTSSTSFKVA

SEQ ID NO: 276591 - protein, 61 aa, Glycine max
  Clone ID: PAT_MRT3847_91781C.1.pep
SQGGDKNNCPPYQELGVPGRFNKKPPSNAPGVEGQKSGSTPPQGNWDRGGEPAKKRGFFPP

SEQ ID NO: 276592 - protein, 53 aa, Glycine max
  unsure (1)..(53): unsure at all Xaa locations
  Clone ID: PAT_MRT3847_91782C.1.pep
FTERIVADDQLEEASTQXFFDGNFPVHSGVPIFVNSLYPVRRFPSEAGAVNVT

SEQ ID NO: 276593 - protein, 147 aa, Glycine max
  Clone ID: PAT_MRT3847_91783C.1.pep
NPNGENLSYSQPRGQKKGRVKMPKKPGGEKFKGGKWKPQKGPLPPKPKTKMVNPTTICLGGRAEKYSQKKKGGRNPPRRGNLRNLETVKKPGPKKDKKKHPPPPKKISPHRKRTGEQKKNKKEARGAKKKTTPPLNPQAPAFLNPFF

SEQ ID NO: 276594 - protein, 25 aa, Glycine max
  Clone ID: PAT_MRT3847_91784C.1.pep
QNSTVILECNFCYISNLFTWSKGEM

SEQ ID NO: 276595 - protein, 60 aa, Glycine max
  Clone ID: PAT_MRT3847_91785C.1.pep
RHVMNSGNGLSSLSLRYDVVPRSGCVSFCNRLVLLSVGGLRVRSQIASQCAFLSFIKENE

SEQ ID NO: 276596 - protein, 43 aa, Glycine max
  Clone ID: PAT_MRT3847_91786C.1.pep
KNLNLLKKKKKKKKKKKKKKKKKKKKKKNKKKKNKTAVYLKKN

SEQ ID NO: 276597 - protein, 50 aa, Glycine max
  Clone ID: PAT_MRT3847_91787C.1.pep
SIMLRSSIVLTQTCAFIFMMVTCHTSVSSTYVAIQYNKGICTYNLGLPLS

SEQ ID NO: 276598 - protein, 103 aa, Glycine max
  Clone ID: PAT_MRT3847_91788C.1.pep
QRTPAWRIDNTLFAQQALKPPLLISGARSCVRNQGLVVRAQRVAPVQVMAGQEDEAVKKALACQTGRLIGDPLRHQVSPDGRGDHIEIRNRQSVCHMHDSARA

SEQ ID NO: 276599 - protein, 182 aa, Glycine max
  unsure (1)..(182): unsure at all Xaa locations
  Clone ID: PAT_MRT3847_91789C.1.pep
MSGPPRVRSMNVAVADADARPVLVPAGNKVRPVVEGRKPVKKSSTETEKKPVAHSPQCVSVPAVAISRQQEHHQAVLKSMSSMNASFSSDTSSTDSSTHSSGASSSGKVTRRVSVALRKKQVGPKTEKASCDNVAGSDDADLSDSLEGKKRCAWVTPNTEPCYIAFHDEEMGVPVHDDRXTV

SEQ ID NO: 276600 - protein, 107 aa, Glycine max
  unsure (1)..(107): unsure at all Xaa locations
  Clone ID: PAT_MRT3847_9178C.1.pep
EILSLVNLKSELQHLYLYTPEEARQLRKTALSRMEWLHKDYVPTITHIXEFHSVHTMSNAACSNVHIELLLSIDLLGVQGAGKAFTNKIVLADQRVLAHTHRLFYGN

SEQ ID NO: 276601 - protein, 60 aa, Glycine max
  Clone ID: PAT_MRT3847_91790C.1.pep
LRFQYTHIRDNDSIILLIYFSHSNPLSTRSCLSYGHSKCSKLIFPYLSDQLSSIVLVTID

SEQ ID NO: 276602 - protein, 60 aa, Glycine max
  Clone ID: PAT_MRT3847_91791C.1.pep
KMKALREVVEGFIKYGNGVNCGVLQTFLDMTSNSYEWKRNWELYIWENYIGKFKKVGCRV

SEQ ID NO: 276603 - protein, 133 aa, Glycine max
  Clone ID: PAT_MRT3847_91792C.1.pep
MATISAAITTPSISRATLVQKRVSSPVLGLPAMGKVGRVSCSMEEKPYSVKESSSSMLGMGASLMAAASAAAMSGPAMALVDERLSTEGTGLPFGLSNNLLGWILFGVFGLIWTLYFVYTSTLEEDEESGLSL

SEQ ID NO: 276604 - protein, 66 aa, Glycine max
  Clone ID: PAT_MRT3847_91793C.1.pep
INADKTKNGNLNIISGHLVQTNTIIKNLYKKRHSSIHASNNLWALTFSSLSHHLNLTPVTHLFIIL

SEQ ID NO: 276605 - protein, 94 aa, Glycine max
  unsure (1)..(94): unsure at all Xaa locations
  Clone ID: PAT_MRT3847_91794C.1.pep
XRVEXRXGHGRXXLWGCXEXSXXRXAXXRXXMAXLXRSCGAMRSCRGVWPSLEFSKVFVRXLXXRVXYHLDXTRNGARTDIELAASEXXNXYLK

SEQ ID NO: 276606 - protein, 114 aa, Glycine max
  unsure (1)..(114): unsure at all Xaa locations
  Clone ID: PAT_MRT3847_91795C.1.pep
LVHGDGADRTWTAGTTAGEGTNKATXEREKSVPTXVGGASTGDEKRTRDRTNDTPWTRCFTIVNTEQNTVVHKMLGNSEEFIMARRAMMPGQAGTHATAMAWTDAANSARAEGS

SEQ ID NO: 276607 - protein, 65 aa, Glycine max
  Clone ID: PAT_MRT3847_91796C.1.pep
PCLCPSHFSSLSFSLSLSLSHTLSLSLTLCRASVVARVPPRRSSFSRRGPSFALYSHAVRYSVCS

SEQ ID NO: 276608 - protein, 149 aa, Glycine max
  unsure (1)..(149): unsure at all Xaa locations
  Clone ID: PAT_MRT3847_91797C.1.pep
MAQGMASNRNRNPCAQEARKVMVVADPTRESAGALQYALAHAVIEQDELILLHVENPSSWRNTISTFLKMPSLGSSTTASLDLGGGGGGGAAAAPDGEGLDFLEEMKHACSVSQPKMKVRVVKVEMDGRDKASIVLSQDKTHGVDVXII

SEQ ID NO: 276609 - protein, 61 aa, Glycine max
  Clone ID: PAT_MRT3847_91798C.1.pep
TDASAHASGALFERAVSLSLPPKKMKFLFKKYLYYEKSQGDEERIESVKRKAMEYVESTRA

SEQ ID NO: 276610 - protein, 85 aa, Glycine max
  Clone ID: PAT_MRT3847_91799C.1.pep
KPLYEVCDRSRPLWCSVFTPHPLNNVVVSCLSASSSVLYVSLACSAHGRFLFVFLMVRPRSLRDKVCGNFNYASLPIMLHTTIVS

SEQ ID NO: 276611 - protein, 34 aa, Glycine max
  Clone ID: PAT_MRT3847_9179C.1.pep
HVLTLIRSYQLMLGGSLRFAITSTARVTVDTTLH

SEQ ID NO: 276612 - protein, 40 aa, Glycine max
  Clone ID: PAT_MRT3847_917C.1.pep
EFMSLEYPLYYPVVYIYVLTWDDLDTNSLTFNVSADYLDG

SEQ ID NO: 276613 - protein, 79 aa, Glycine max
  Clone ID: PAT_MRT3847_91800C.1.pep
LKYIKIYNNIKPSKLNIEVFACLMRASHGFSLQSPQASRTGPKFAYNYAGSKKKRPVICTVRKLRVRPFEEKEGGNGKK

SEQ ID NO: 276614 - protein, 201 aa, Glycine max
  Clone ID: PAT_MRT3847_91801C.1.pep
MEMPARRSGNYTLLSQTPDDNLTAPLFGCSSGDGQINSSKFERVSDWDSGVEHRQGNRIGNLHSSFGMQRQSSEGSFGESSLSGEFYAPTLSAIAANEIDGFRGTFAGNSAARSGGSSGKSWAQQTEESYQLQLALALRLSSEATCADDPNFLDPVPDESALRSLSSFSAEAVSHKFWVKGCLLYFDKILDGFYLIHGMDP

SEQ ID NO: 276615 - protein, 56 aa, Glycine max
  Clone ID: PAT_MRT3847_91802C.1.pep
NLGFEKTLQNWAPPKLKVFQWPEQEFLFLPNRDNRALVQKLGGLEKIPPCLEGPRP

SEQ ID NO: 276616 - protein, 51 aa, Glycine max
  Clone ID: PAT_MRT3847_91803C.1.pep
MRMAHGTTNYLQQQEKSKATSICLLHDKTSSIAAQSNSVHLPASVSLARQP

SEQ ID NO: 276617 - protein, 267 aa, Glycine max
  Clone ID: PAT_MRT3847_91804C.1.pep
LTNIPTRSLIPHCIMAKEPSLCLLFLSFLIFCSSGTSVSSSSSSVGTTFFQKSKISKSEIRFSVSDCKILSTLTNTNLSVDFFLNESLVENFVSSKSKSSLVSWLETHLMNIIPQVDIRSIVVRCGSECLGQYEMPSLIPILKSIHSFLSNLQLRREIKVSVAFPLSFLENLNALYGNDLLRIVMFLKKIDSFIMIEDIIGGELSTVQSVIERATLAAAILPCKDVPVVLTIKSHDIPSSMELSQFTEAVSKYLEAVSHFTKRIVAF

SEQ ID NO: 276618 - protein, 82 aa, Glycine max
  Clone ID: PAT_MRT3847_91805C.1.pep
REESMELRRGRSFLRVWRAGRSHDDTGVVATESWWWRSGITSSNNESQVARPNTNNNKELAAGRPKRQGHTSSYLKDYMLAT

SEQ ID NO: 276619 - protein, 132 aa, Glycine max
  Clone ID: PAT_MRT3847_91806C.1.pep
MSLFARSVSTLLVLILLLPTLNNTMAEKALIGVTNNLGSRNLTVSCKIDNHPHLLGPTDYYEWKFSPEYNDEFGTEPLFSNCSFQWEGAHHSFDLYVLVRDGDCNNCSWHIKLDAACRYTGNLRFACYQWKT

SEQ ID NO: 276620 - protein, 64 aa, Glycine max
  Clone ID: PAT_MRT3847_91807C.1.pep
NRCGVRKKQAAVHEEMNRMNQLPANSAYATHRMKVLNKILQLMSVQRTVSQEQELELLFAGLSL

SEQ ID NO: 276621 - protein, 56 aa, Glycine max
  Clone ID: PAT_MRT3847_91808C.1.pep
LSNSFLTSIELYCRLLDLLHFQTTTTLGKYISINILFNSLLYASIIYSYLITFIFC

SEQ ID NO: 276622 - protein, 74 aa, Glycine max
  unsure (1)..(74): unsure at all Xaa locations
  Clone ID: PAT_MRT3847_91809C.1.pep
FLYEFPAXFITGNFTQSLCDQQKQLPQFLPLIHSYLYYKKFPLQPLKTTTKITTNFLSNIPLQLINFIHPYNSF

SEQ ID NO: 276623 - protein, 103 aa, Glycine max
  unsure (1)..(103): unsure at all Xaa locations
  Clone ID: PAT_MRT3847_9180C.1.pep
MWKAHVAVAFVQLFNGGYHVITKVALNVGINQLVFCVFXDLLALSILAPLAYVRENTERVNLLRYDGLAKVGGTIICVSGAIFMVLYRGPALIGYAELGHVTQ

SEQ ID NO: 276624 - protein, 124 aa, Glycine max
  Clone ID: PAT_MRT3847_91810C.1.pep
KTRENFYFLTPIKFNQTSQFKKKTEPSNFLIFKAGKKKNQIRGKRHPIIKKVDKNGGPPVFAFFPCMGAHWESFFPNPEKKGPTNSLKFPPKISCLTKKKKRGGAFGQKNLALLEKKHKLFFGG

SEQ ID NO: 276625 - protein, 53 aa, Glycine max
  Clone ID: PAT_MRT3847_91811C.1.pep
EARIRSRRVYRSEHELQTEIVLFLLNIIRARSRATSASPGTTLVPTQSINCSN

SEQ ID NO: 276626 - protein, 112 aa, Glycine max
  unsure (1)..(112): unsure at all Xaa locations
  Clone ID: PAT_MRT3847_91812C.1.pep
MENIKDPSIYRNPVILQSEDLTKYILETAVYPREPAPLKELREATNNHPWGFIATLPEAGQLMTLLLKLLNPKKTIEVGVFTGYSLLLTXLNIPHDGKITAIDINRKASDGG

SEQ ID NO: 276627 - protein, 240 aa, Glycine max
  unsure (1)..(240): unsure at all Xaa locations
  Clone ID: PAT_MRT3847_91813C.1.pep
MENIKDPSIYRNPIILQSEDLTKYILETCCLPLKEPXPLKELKEATNNHPWGFIATLPEAGQLMTLLLKLLNPKKTIEVGXVFTGYSLLLTALNIPHDGKITAIDINRKTYEVGLPVIKKAGVEHKIDFIESPALPILDKLLEDPANEGSFDFAFIDADKENYVNYHERLIKLVKIGGLLVYDNTLWGGRVCWPEDKVPPHARSGRDAAIEFNKTITNDSRVEFALTSVGDGLNICRRVA

SEQ ID NO: 276628 - protein, 215 aa, Glycine max
  unsure (1)..(215): unsure at all Xaa locations
  Clone ID: PAT_MRT3847_91814C.1.pep
MGFLVLLLFSLLGLSSSSSISTHRSILDLDPTKFTTQKQXSSLFQPWKSEHGRVYLNPEEEAKRLEIFKNNLNLIRDLNSNRKSPHSSSFKGLNQDLLDIXPPSKKFSKKVPCKPPRIVSQQIKMANKKMKKDXFSCEPPPASWDWRKKVSSPIRPGAGNXWAFSATGAIKAAHAIATGXLVSLFLNXKLVELVWKKAKGCYNGWHYQSFEWGFK

SEQ ID NO: 276629 - protein, 143 aa, Glycine max
  Clone ID: PAT_MRT3847_91815C.1.pep
ARTSSASHCSLPPATARHRCPLLATAPSDTRARFKVSDSRFIFFSRNFPKICGILNHYCRPLLATVVLCLPLHHRTRARFKTNDNRKGRVFGLGSEIGKYKPSSSILFDGFSSHVYEKMKSQLSNLTKENKNMKEVFLASQEE

SEQ ID NO: 276630 - protein, 140 aa, Glycine max
  unsure (1)..(140): unsure at all Xaa locations
  Clone ID: PAT_MRT3847_91816C.1.pep
ERLGWPPPRRSTRRVPTARPSRWRRPRPRRPPPPPPGGPXAPPPPPPPPPPPAPRPPPPPRPPPPPLPPPPPPPPPPAPPLPPPPPPPPPPPPPPPPAPPPPPPPPPPPPPPPPPPPPPPPPPPAPPPPPPPPSPPPPPP

SEQ ID NO: 276631 - protein, 39 aa, Glycine max
  Clone ID: PAT_MRT3847_91817C.1.pep
YTSRASYLITQGRCPDSPVSDAISPINTLNLRRWLLHMG

SEQ ID NO: 276632 - protein, 38 aa, Glycine max
  Clone ID: PAT_MRT3847_91818C.1.pep
YVDYLVYGSRRSPRYGKGYSTGMTSIVMSSWDHKIFGN

SEQ ID NO: 276633 - protein, 53 aa, Glycine max
  Clone ID: PAT_MRT3847_91819C.1.pep
TAATVKALRKLTPNTIDGVMIIPLRPFVHMWFRPTFKHSRVSAYVCEPQNERQ

SEQ ID NO: 276634 - protein, 153 aa, Glycine max
  Clone ID: PAT_MRT3847_9181C.1.pep
SCHPEHLQSSSRAQKVSWGLWGDQQNLTYEDSMICRICEVEIPIVHVEEHSRICTIADRCDLKGLNVNERLERVSETIEKILESWTPKSTPKSTDTPGESFELAAVSTSSVHEEFNDLSLERNNLTCRCSEDMLDSTAEHDNTFVMEDLNLSP

SEQ ID NO: 276635 - protein, 55 aa, Glycine max
  Clone ID: PAT_MRT3847_91820C.1.pep
PSTNWITPITRTNWQKKLGQETKSNLTWLKSVCSREDRKTPWEGHHRKFAHHTSL

SEQ ID NO: 276636 - protein, 108 aa, Glycine max
  Clone ID: PAT_MRT3847_91821C.1.pep
ATAFKFCPSLKHGRFIWNGMKISGSYVMEVNCIMFLVLRLLAEHLKMNKAERLHSFTLLFKWNKDLILGRNMNVVLPVLSVQCKFCYVPISTVKRFPLFLCYLPISPC

SEQ ID NO: 276637 - protein, 96 aa, Glycine max
  Clone ID: PAT_MRT3847_91822C.1.pep
FVSDRSTIAVGAVSLLCGWPCCKTIPYMQSCWHTCRAGPLWPMQWLLLCSVCTCYFALPAFRLTYHEGGPIYYLPIICYLVNCRFLCGGHGWPALT

SEQ ID NO: 276638 - protein, 240 aa, Glycine max
  unsure (1)..(240): unsure at all Xaa locations
  Clone ID: PAT_MRT3847_91823C.1.pep
ASFFGSTKCQSKTKQNSNSSERKAPLKTSASNVGKPISNSLKSFTFNDLREATKNFRQENLIGEGGFGFVYKGWIDENTCTPTKPGTGIVVAIKKLKPESFQGHREWLAEVNYLGQLHHENMVKLIGYCTDGKNRLLVYEFMQKGSLENHLFRKGVQPIPWITRINIAVAVARGLTFLHTLDTNVIYRDLKASNILLDSDFNAKLSDFGLARDGPTGDNTHVSTRXIGTHGYAAPEYVAT

SEQ ID NO: 276639 - protein, 101 aa, Glycine max
  Clone ID: PAT_MRT3847_91824C.1.pep
SEFGAPLRPRRSTLSGPSPLTTRPFILCQLIPPSPISSHSQSHSPTGTIQSTEAAAPSSVRSAVTITTAPEFFAAPYAYNYYHGPHNLDHYHPVTGPWTVR

SEQ ID NO: 276640 - protein, 49 aa, Glycine max
  Clone ID: PAT_MRT3847_91825C.1.pep
FQFQAVGNILMVVFWVPTHTQMLGGALLTQQLKASRAQGTLQCYIQLLD

SEQ ID NO: 276641 - protein, 151 aa, Glycine max
  unsure (1)..(151): unsure at all Xaa locations
  Clone ID: PAT_MRT3847_91826C.1.pep
XXFPXSXXSSFTXXSXFFFXXXXSXLXFXXFXXLXXXXCCFYXFSXVXXFXXSFFLSSXSXXXYXSSLLTYXXLFXXLXXXXXXXTXXXHXXXXXXWSXALXXXLXXLFFXXWXLXXLXXLXXFGXXXDLXXGSXFLXFXXXFVXXXXLFX

SEQ ID NO: 276642 - protein, 61 aa, Glycine max
  unsure (1)..(61): unsure at all Xaa locations
  Clone ID: PAT_MRT3847_91827C.1.pep
MRMKGLVLIVDTLLVAWQCHAYDMYPPPMNAGXSARTPEVTCASWKRAVVAHNIFGFETIP

SEQ ID NO: 276643 - protein, 79 aa, Glycine max
  Clone ID: PAT_MRT3847_91828C.1.pep
AVLLTHTLILPSLSPHHLLLLLPLIPHLKQHIISFLNNQTLLHNIPFKTFFSLPSILFFILYKSIPSFTLLLTTSPYLP

SEQ ID NO: 276644 - protein, 130 aa, Glycine max
  Clone ID: PAT_MRT3847_91829C.1.pep
MQAVGRIISQGVVRFSGPFHPFGGAVDIVVVEQKDGTFKSSPWYVRFGKFQGVLKAREKVVDICVNGVQADFQMHLDHTGEAFFLREIDAQGQEEEDAILMFPSSSADDEADDHSRSHSLKSKSLNYDAA

SEQ ID NO: 276645 - protein, 68 aa, Glycine max
  Clone ID: PAT_MRT3847_9182C.1.pep
RTKQTGPKSPRRKAPKKQLATQGAPKSAPTTGGVKKPPLHCPGTSAFPETCKSQNNSQPLNPFLPLPR

SEQ ID NO: 276646 - protein, 65 aa, Glycine max
  Clone ID: PAT_MRT3847_91830C.1.pep
RRDLSVHTGASKEYSSIHISSSFFESELYDILLGDLLGFPSETYLFCLLARFDSWYALTASGPQK

SEQ ID NO: 276647 - protein, 62 aa, Glycine max
  Clone ID: PAT_MRT3847_91831C.1.pep
VIFHLYPFLKGLMGRQNRTPTNVVLWSVLLASVFSLVWVKINPFVNTVDSETIAETCIAIDC

SEQ ID NO: 276648 - protein, 146 aa, Glycine max
  unsure (1)..(146): unsure at all Xaa locations
  Clone ID: PAT_MRT3847_91832C.1.pep
PAPQSCLGPHVMGAKGVVSFFGPNGPFGPPGGKGPQTLGFFFFFPGIKPLSFTKAGGPLFKPPRGVLPGLFFSGMEVFXIYGAPRMGPPFGPIFFXGPKPPPLAFGSLGLPPPLVFFGNVLPGLFLTAVEFFEIPPPFFFFPPIFV

SEQ ID NO: 276649 - protein, 145 aa, Glycine max
  unsure (1)..(145): unsure at all Xaa locations
  Clone ID: PAT_MRT3847_91833C.1.pep
DPRGRKXXRRRGRXXQEAXAGKKQERADXATXKXGRRXRSRANTXSKRQPERQHXTRGDKAEAEAAKRRXKPKGGGRGERRXQKQTRKQRRRPXERQGXAERXKRERQSRGGGXEHEGGQHGTRGKTQGQRAKSSKPGRQNQNRG

SEQ ID NO: 276650 - protein, 84 aa, Glycine max
  Clone ID: PAT_MRT3847_91834C.1.pep
GDIVDKIKSSLHAANKAVSKIEEHMSGGSSGGSSSGGSKGGVPAPSAEYEMVNKSLGEKFVSPFRRSLGVGPTLELLHLFSFSI

SEQ ID NO: 276651 - protein, 212 aa, Glycine max
  Clone ID: PAT_MRT3847_91835C.1.pep
SGLSALVRRAVTKLSLQFQTPSSLSLSPSSLSISKTPTPPSLFSFRHPLSHSTHASKTTTSPPPSFEFQLFIPPGIEPDEVDDSTVLPGSNIAVGPYAGHSHIKDVQFVKSSARFVKSSARARDCPKDNRPEFAVLGRSNVGKSSLINSLVRKKEIALTSKKPGKTQLINHFLVNKSWYLVDLPGYGFAKAPEAAKTDWASFTKRYFLDKSA

SEQ ID NO: 276652 - protein, 133 aa, Glycine max
  Clone ID: PAT_MRT3847_91836C.1.pep
TPTRQTYSGTPQGISGAEKAEAGETTRRIAEREEKPRRMQGGSRTAGTGPPMESGPRGPASQKSSKRESRKRDSELRPPHSASPRRITAAQTAEAGDTDRLMTEPEELAGPKTSSSASQAARPPQARGPLFEG

SEQ ID NO: 276653 - protein, 69 aa, Glycine max
  Clone ID: PAT_MRT3847_91837C.1.pep
RIWPKCLNHRWPSKNVPANIPNSFSQTLPLGKPNPLQDLNQLTPFANQIKGIHKGRLHKIKGVEKEENQ

SEQ ID NO: 276654 - protein, 54 aa, Glycine max
  Clone ID: PAT_MRT3847_91838C.1.pep
SPIHTAFIARAHILLGGAFSAALINLLLPLGIAVVSCIWINHWIHWPGLLIAGA

SEQ ID NO: 276655 - protein, 40 aa, Glycine max
  Clone ID: PAT_MRT3847_91839C.1.pep
PTGRPWNCQKYKLTVCIFNLKTYLKTHKLSPRLWRAVCFL

SEQ ID NO: 276656 - protein, 159 aa, Glycine max
  Clone ID: PAT_MRT3847_9183C.1.pep
GRLGVSRGLGRGIVDFHGEMVLLENYTALNYTGLVKIIKKYDKRTGALLRLPFIQEVLNQPFFKIDVLNKLVKECEVILSILFNNDWPSISGDFEEDEYGSTTGNESKATLMHVPKELAEIENMENTFTKLTLSALRSLEEIRGRSSTVSIFSLPPLHN

SEQ ID NO: 276657 - protein, 185 aa, Glycine max
  unsure (1)..(185): unsure at all Xaa locations
  Clone ID: PAT_MRT3847_91840C.1.pep
DLVEGNYRFXLRSTSRLEKVSSTKAQFDSGKTFIYDIVGAGSHSSEDFADEEDXEKPKKIDARLRQRIHSYYNEDQAQMETNLCKLPIDEVETTKGSMLDLKISQSKIALPKNTGGGTILRIDLLAYFLTXGRFGARVDLQRTHXYKGMIXMVATVGIPENTCIALHCAMNSSFRGRASSDFTLS

SEQ ID NO: 276658 - protein, 604 aa, Glycine max
  Clone ID: PAT_MRT3847_91841C.1.pep
PTRPSISPLSFVPTVNNVSSNSIAPPSPLHPFSRFQSIKNRKPKPHHIPRITCSGNQNNPTPNPNSQGEPPHIVGHRRNVLLGLGGLCGAVTLNNNNPFAFAAPISPPDLNTCGPPDLPAGVKPTNCCPPSSKITDFKFSPSNQPLRVRPAAHLVNDEYLAKYKKALDLMKKLPSDDPRNFTQQANVHCAYCDGAYHQVGFPDLDLQVHNSWLFFPFHRWYLYFYERILGSLINDPTFALPFWNWDAPKGMQLPSIYADPKSPLYDTLRNANHQPPTLVDLDFNLEDPISNGKISNNLTIMYRQVVSNGKTPTLFLGNPYRAGDEPDPGFGSVENVPHGPVHLWTGDINQPNIENMGTFYSAARDPIFYSHHSNIDRMWSIWKTLGGKRRDFTDSDWLESAFLFYDENKNLVRVKVKDSLDTRKLGYVYQDVDIPWLNSKPTPRRSRVQKVALAQNFGVGAAHAAETSRNVKFPLVLDSVVSTMVKRPNKSRSKKEKEEEEEVLVIEGIEFERNTPVKFDVFINDEDDKQIRPDNTEFAGSFVSVPHSHMHKNKDIITCLRLGLTDLLEELEAEDDDSVRVTLVPRYGKGRVKIRGIKIELLSD

SEQ ID NO: 276659 - protein, 47 aa, Glycine max
  Clone ID: PAT_MRT3847_91842C.1.pep
FTCHSMLVFKHDFSFRGRSYHKLAGHHPVPHCQQMITDVSLLLWHPS

SEQ ID NO: 276660 - protein, 145 aa, Glycine max
  Clone ID: PAT_MRT3847_91843C.1.pep
AARRRQKGNKNIKKIVQKMTVSYKDWHEMLSFTLHGYRTLVRTSTGAMSYSLVYEMEVVLPFEVEVPSQRIMAESGLEKSEWAQARYDQLNLIESKRLGAMSHGRLYQRKIKNAFDKKVRPRKFNEGGLVLKKMSHPVKIIEGGG

SEQ ID NO: 276661 - protein, 84 aa, Glycine max
  Clone ID: PAT_MRT3847_91844C.1.pep
GRFQQTSNNAGMNYQGPGTRDAFRSPLPNWNQTRHAPVNANVNPRIENNRQAFTLPGSRHSMPSHENIRSPPPNAPNTPRPGYG

SEQ ID NO: 276662 - protein, 116 aa, Glycine max
  Clone ID: PAT_MRT3847_91845C.1.pep
SSHAMVLLSVPSFVVTVSHSSCLYTAAAAFVVLNAPSVHRQLNVITTCYNPSHHVGLWLFGFPNPFYYQVVGSFNNVTVITVVLCRTNLITRHAKPALLNHLGCLLGPIGCSVINT

SEQ ID NO: 276663 - protein, 62 aa, Glycine max
  Clone ID: PAT_MRT3847_91846C.1.pep
SSLSYIFHQSRLDHNITLTTSVSKAFNVTEVLALASHTMSDMIAVQRTNGAIPVPNITSSMM

SEQ ID NO: 276664 - protein, 107 aa, Glycine max
  Clone ID: PAT_MRT3847_91847C.1.pep
MQEDKKMKVKKGFLAVQVGLEDDDEGGSSPQRFVIPISYLYHPLFKRLLDKAREVYGYHTDGPLKLPCSVDDFLHLRWRIQKESTPNQNHHNQSHHRLPHALHFHSC

SEQ ID NO: 276665 - protein, 59 aa, Glycine max
  Clone ID: PAT_MRT3847_91848C.1.pep
VRGGFNGPSMRWLLRRANSNVPSGADASVIHAVLGSFSMALYYDSSGLVRTGCEVCIFV

SEQ ID NO: 276666 - protein, 59 aa, Glycine max
  Clone ID: PAT_MRT3847_91849C.1.pep
VHPFIVIIVSIQEISAIASICGILTVQYSRGNIQRHNWYHGERISRSLGIGFRVLISVH

SEQ ID NO: 276667 - protein, 72 aa, Glycine max
  Clone ID: PAT_MRT3847_9184C.1.pep
RDMCLCFSVPLRLVLVRLLAPLTAPAWAFPLRFFVAAPVWPDRTSPLSPVVGNQGQLFSICPPFCRLLAAVY

SEQ ID NO: 276668 - protein, 87 aa, Glycine max
  unsure (1)..(87): unsure at all Xaa locations
  Clone ID: PAT_MRT3847_91850C.1.pep
ICHQGKTCVDPGQAWLTFQNFPPKHLXRKTILGFGMGIWVEIFYLTPHSSGQGLLGLKTFPLSVTLPLKGLKKGPFILGKKIFFFGF

SEQ ID NO: 276669 - protein, 210 aa, Glycine max
  unsure (1)..(210): unsure at all Xaa locations
  Clone ID: PAT_MRT3847_91851C.1.pep
SNLLLCQGVVSTPVCPNGXGNCQVSLRDLFDRAVMVSHYIHDLSSEMFNEFDKRYAQGKGFITMALNSCHTSSLPTPEDKGRAQQTHHEVLMSLILGLLRSWNDPLYHLVTEVRGMKGAPDAILSRAIEIEEENKRLLEGMEMIFGQVIPGAKETEPYPVWSGLPSLQTKDEDARYSAFXYLLHCLRRDSSKIDTYLKLLNXRIIYNNNC

SEQ ID NO: 276670 - protein, 77 aa, Glycine max
  Clone ID: PAT_MRT3847_91853C.1.pep
STQPFQLRGFMIVYNFSLVALSLYIVYEFLMSGWLSTYTWRCDPVDYSNSPEALRMVRVAWLFLFSKFIELMDTVIF

SEQ ID NO: 276671 - protein, 95 aa, Glycine max
  unsure (1)..(95): unsure at all Xaa locations
  Clone ID: PAT_MRT3847_91854C.1.pep
SLGDHHTDQIDVITYVRYITLLSRVIARSTGTTMYLGLFYRLACDALMYLAPVLLDQGDGDPEQAYPXYTFDDYMTLYATLLITANEPRFETLAI

SEQ ID NO: 276672 - protein, 77 aa, Glycine max
  Clone ID: PAT_MRT3847_91855C.1.pep
QLLSSSFSRSRSTLFFRPIVVLSLFLSLWCGDLPLLRCVATLPSFCHHTPSPSSMVFSFVQILISICCIACRSFSLS

SEQ ID NO: 276673 - protein, 84 aa, Glycine max
  Clone ID: PAT_MRT3847_91856C.1.pep
ASLTHTLVGSSVVLASATHRDRLTRLSLASQLFIWQVQSVPHNANSMIMMQRGLDKWPLNSSEPSVVIIPKDGIAYSKWSESMG

SEQ ID NO: 276674 - protein, 66 aa, Glycine max
  unsure (1)..(66): unsure at all Xaa locations
  Clone ID: PAT_MRT3847_91857C.1.pep
FALPPLPVCSIYFGXLCLRTPFISFLYHSYRRMNTLXLPPELDNAVFSXLSSXYPGPSPFFTFLHL

SEQ ID NO: 276675 - protein, 93 aa, Glycine max
  Clone ID: PAT_MRT3847_91858C.1.pep
SDCDGSHVFFLVPCPFSLTHNSLIKVPYLINLLISHQTKPLIWIHGNVFFLDSDTVTSHSFHSYSPTTRSQYLKYLFTLLIFPRSHSWNVHGG

SEQ ID NO: 276676 - protein, 45 aa, Glycine max
  Clone ID: PAT_MRT3847_91859C.1.pep
GDGAPDPPSTAVPYSSSRSEPSRMRPPLFLSLKSILALFLPLEMR

SEQ ID NO: 276677 - protein, 77 aa, Glycine max
  unsure (1)..(77): unsure at all Xaa locations
  Clone ID: PAT_MRT3847_9185C.1.pep
ARXFDTXXIPQRSXQCQLRHWQEAFKALXSHXKXEXXDXECXXRNGNIXDQSVIEEPXGXLPGNHXXXGFPGKLRXX

SEQ ID NO: 276678 - protein, 50 aa, Glycine max
  Clone ID: PAT_MRT3847_91860C.1.pep
SMAVNGASVMRRCSVAARYDITSHTLLPGSSYLSSSNSKPTTILSSFMGT

SEQ ID NO: 276679 - protein, 106 aa, Glycine max
  Clone ID: PAT_MRT3847_91861C.1.pep
MRDTKLPEVVFLLLFTLILASKFTQGIRTEESVSQSPQPQREPSLEDGNEAWKMRNSRRLMIGSTAPTCTYNECRGCKYKCRAEQVPVEGNDPINSPYHYRCVCHR

SEQ ID NO: 276680 - protein, 55 aa, Glycine max
  Clone ID: PAT_MRT3847_91862C.1.pep
PLLITLTLYYLLIIPLYTISHSKLIFTYPLPISNILLFTIPINSNPSTYPINPLS

SEQ ID NO: 276681 - protein, 134 aa, Glycine max
  Clone ID: PAT_MRT3847_91863C.1.pep
IYARSSSCHTLLHEFFISYEFHSILTLFSPSFFYSLSFYDFGSSSHTKESYFHFYVIVELLQLMVFFILSIHRILKKITFLILPGATIHLYFLLNFVEEQSRLSFPMLMNFISISFLRLHFLCILNLPLYCCRN

SEQ ID NO: 276682 - protein, 32 aa, Glycine max
  Clone ID: PAT_MRT3847_91864C.1.pep
HRHKMFIIKSGARVMIHTVGGEYVSSPVFPIE

SEQ ID NO: 276683 - protein, 53 aa, Glycine max
  Clone ID: PAT_MRT3847_91865C.1.pep
SSVLISLQRLRPGGVRIQSQDQWCPRSLRAQRHPSCLPLGYLRASLSVTPVLL

SEQ ID NO: 276684 - protein, 148 aa, Glycine max
  Clone ID: PAT_MRT3847_91866C.1.pep
SCEKTTEGDLGNVQLISISSDAKNLVTSDFEGKHLQVWKCDLNSGNVGRGPTLPIRHPPLILDCHSGCNKEDVVVLAVTGRGSAYIWNLNASSEDQIQPTKLNTKTKIVETEKENGVCSKKRHASIIASRLQPVEEDKQIKALVTYGS

SEQ ID NO: 276685 - protein, 69 aa, Glycine max
  Clone ID: PAT_MRT3847_91867C.1.pep
NSFGWGAQILGLRCSFFWPWWVNHAGWWAPPNGPMWDITFPPVWKTSCWGGLPVSGFLPLLGGIAYTGG

SEQ ID NO: 276686 - protein, 77 aa, Glycine max
  Clone ID: PAT_MRT3847_91868C.1.pep
MAARVWHLMTILIKGSVAGGAVYLVYDQELLGPIDKSDADLRKADEAVPPGMYQLIQYVCHHTGLEMSQIPAPAKIN

SEQ ID NO: 276687 - protein, 49 aa, Glycine max
  unsure (1)..(49): unsure at all Xaa locations
  Clone ID: PAT_MRT3847_91869C.1.pep
FTXKKFSSGLFVYNLLSLLSLAFSNQNTLRARISEHYLTHAKQKKWAFL

SEQ ID NO: 276688 - protein, 79 aa, Glycine max
  Clone ID: PAT_MRT3847_9186C.1.pep
SFQYEFTSLTSPLRLKMIVILKCICSFHHSSCLKSFMKNGVQWRNLHTQLCILVFMEVSYLIQHCWYSPLMITWFTDGM

SEQ ID NO: 276689 - protein, 41 aa, Glycine max
  unsure (1)..(41): unsure at all Xaa locations
  Clone ID: PAT_MRT3847_91870C.1.pep
MAKEKDQINIXAVGHVHPEDATTINELNNPVVDKEAPGHAT

SEQ ID NO: 276690 - protein, 60 aa, Glycine max
  Clone ID: PAT_MRT3847_91871C.1.pep
KMATLSCIQQVWGEELNTILCALDHWLFTCLLVAVSTRADLVLLKIPQNRALSWSSMILV

SEQ ID NO: 276691 - protein, 106 aa, Glycine max
  unsure (1)..(106): unsure at all Xaa locations
  Clone ID: PAT_MRT3847_91872C.1.pep
STFLXRRTKHTSRKGRKRPPKQTHHTPRRRPPGGTPARAEKERRGATNRQEPQNGRKGASHADTTKGETAKDPAQEQDRGQRGNRRTHQDAQGGQDIKKPTTSTHL

SEQ ID NO: 276692 - protein, 101 aa, Glycine max
  unsure (1)..(101): unsure at all Xaa locations
  Clone ID: PAT_MRT3847_91873C.1.pep
GIRCLKSNAGLFCWVDMRHLLGSATXFEAEKELWMNILCKVGLNISPGSSCHCCEPGWFRVCFANMSEDTLEVAMRRIKAFADSITISTSVVRGSIAKWEN

SEQ ID NO: 276693 - protein, 53 aa, Glycine max
  Clone ID: PAT_MRT3847_91874C.1.pep
HYTLITIRTKVRLLLQSFIYQFIPLDVVTNEWVVYSLRRDPVATWVDIHEEGV

SEQ ID NO: 276694 - protein, 92 aa, Glycine max
  Clone ID: PAT_MRT3847_91875C.1.pep
YGCEKTTEGGRKKLILKISLNRDKQMAKASLLFPYLIVIILIAFGTGFANACNFPCHSRNGCGNLHCPGCLKQCVNFCCLCDCSPPPNGNVS

SEQ ID NO: 276695 - protein, 73 aa, Glycine max
  Clone ID: PAT_MRT3847_91876C.1.pep
AAYTASGPWEKSLIVPPPLHNVPYADDVVWVSVVTVYDADAPIPFLTSKIQYVRRSLTHSLDGQHILSNMYLM

SEQ ID NO: 276696 - protein, 59 aa, Glycine max
  Clone ID: PAT_MRT3847_91877C.1.pep
GSLLLYLCYSGDLNPKVAGIFIANIIPSLCVHKSPSLALIVAHALNTLCNPPYVVFSQP

SEQ ID NO: 276697 - protein, 105 aa, Glycine max
  Clone ID: PAT_MRT3847_91878C.1.pep
KMGWLFTNLFTRFFVRKRDAFLRGGLDAAGDTPILHTLTLRDFVTPFPTFGFSGDTGEYKNILFTVWDGGAQYKTRPLWTLFLQNTRGLIFVVDSNDRHRVFEAR

SEQ ID NO: 276698 - protein, 47 aa, Glycine max
  Clone ID: PAT_MRT3847_91879C.1.pep
IAYLMSPFNYHNSSFYIMKVSVRLRNCNCYSLQLLQVMIYESCRLTS

SEQ ID NO: 276699 - protein, 165 aa, Glycine max
  Clone ID: PAT_MRT3847_9187C.1.pep
VVLYFTSLRGVRKTYEDCCHVRLILKGLGVRVDERDVSMHSGFKEELKELLGHGYGKGGLGLPRVFVGRNYIGGAEEIQQLHEEGKLEKLLDCCGKIEDGIDGDGLCEACGDVRFMPCETCYGSCKIYYEGDEEEDYDGEVGEYGFQRCPDCNENGLIRCPMCCY

SEQ ID NO: 276700 - protein, 49 aa, Glycine max
  Clone ID: PAT_MRT3847_91880C.1.pep
IGWEYGNSSMENISSVIICRLTPFCNNYCHHHPLIAASKGKHKNIKLFP

SEQ ID NO: 276701 - protein, 97 aa, Glycine max
  Clone ID: PAT_MRT3847_91881C.1.pep
MESKIYIWKIWQWATSVKLTLFENSLKALRIIKTNNWGHKRRLWVYMNGARSLYPNGPYNDHCVSMCNVFSFNSDLHRLLCLYPFLFQFSPVFISKG

SEQ ID NO: 276702 - protein, 156 aa, Glycine max
  Clone ID: PAT_MRT3847_91882C.1.pep
FVVVNKHLLHDLTEMGLWSPTLKNKIIYEDGSVQKIPEIPADLKNIYKTVWEIKQRTLVDMAADRGCYIDQSQSLNIHMDQPNFGKLTSLHFYAWSKGLKTGMYYLRSRAAADAIKFTVDTSALREKSNVEDDDNTKMAQMVCSLTNRDECLACGS

SEQ ID NO: 276703 - protein, 57 aa, Glycine max
  Clone ID: PAT_MRT3847_91883C.1.pep
HIISGVGGSAQILISHTTYFIMKAYFIFLFLLCTHQHIKFKHQFQFMHRIQHLQKKY

SEQ ID NO: 276704 - protein, 176 aa, Glycine max
  Clone ID: PAT_MRT3847_91884C.1.pep
MAKTYQIVLAGSSWGVRNTFHSLVAILTTLVVITTIYLRQDGGHVSPKINASSSNSSSSSKCDLFSGKWVFDNESYPLYKEKECTFMSDQLACEKFGRKDLSYQNWRWQPHHCNLPRFNATALLERLRNRRLVFVGDSLNRGQWASMVCLVDSILPKTLKSMHSTANGSLNIFKAK

SEQ ID NO: 276705 - protein, 42 aa, Glycine max
  Clone ID: PAT_MRT3847_91885C.1.pep
LLHFFYSLYFLSNQIIIVHNQSLPLSVHYQTIQLLYKSKPSI

SEQ ID NO: 276706 - protein, 61 aa, Glycine max
  Clone ID: PAT_MRT3847_91886C.1.pep
EQPLCLQVSMIVILVDIVIARLRNRYWYLPTHLVVTKFAWHSVSPYNTHVIAIRITFCVDT

SEQ ID NO: 276707 - protein, 70 aa, Glycine max
  Clone ID: PAT_MRT3847_91887C.1.pep
TNQHYNADEESANLDLTSTGLTEHSRYLRINYLLTYTQHLYYTQSAKPGILILIYIRLGVIVRLSFLSVI

SEQ ID NO: 276708 - protein, 70 aa, Glycine max
  Clone ID: PAT_MRT3847_91888C.1.pep
PSWSTSFPFFPIPFWVLKSLSSLAGICLPGNPNPEASPPVNCQCFKRFGLVQGLKKVKVLGPLGSPFFGF

SEQ ID NO: 276709 - protein, 46 aa, Glycine max
  Clone ID: PAT_MRT3847_91889C.1.pep
YSSVQSMANVVEMSLLWSARTFLSFLLSALVLIKLNLKLEDCTHAD

SEQ ID NO: 276710 - protein, 38 aa, Glycine max
  Clone ID: PAT_MRT3847_9188C.1.pep
VITSMLRDTLSYMSYFFSNTGSEVHSYDPQAILVEHIN

SEQ ID NO: 276711 - protein, 58 aa, Glycine max
  unsure (1)..(58): unsure at all Xaa locations
  Clone ID: PAT_MRT3847_91890C.1.pep
DSEPYRAHSNTMAEYGLNGINNLNXSTSRSTTEXNVPMDFNATXDGGTRGISCAADIN

SEQ ID NO: 276712 - protein, 127 aa, Glycine max
  Clone ID: PAT_MRT3847_91891C.1.pep
RGEKLDLKGITMGQKMDIFLGKKLPPPLFLFNRKKKQKLFLFYVKSLFFWPTQFSHRLIYFKPAIPHKQKNLKRGFPIPPWSFPPGNPPPPFFHPSEKPQPKGSKLNLILELGPFLRKKRFSGPFFF

SEQ ID NO: 276713 - protein, 42 aa, Glycine max
  Clone ID: PAT_MRT3847_91892C.1.pep
FSITTMNTQLLVQECDGSPRYSTCEKPRRIPIYGHGLDRASL

SEQ ID NO: 276714 - protein, 59 aa, Glycine max
  Clone ID: PAT_MRT3847_91893C.1.pep
VNHSIIDIYCQLIPTEIPSYINNTAPNIKKHHLTGNLLLKRKVFLSNNIISQFQNRHLL

SEQ ID NO: 276715 - protein, 36 aa, Glycine max
  Clone ID: PAT_MRT3847_91894C.1.pep
TLNQPNHHLYTGLLPTIQMMVGLFESSVQTIFNFTT

SEQ ID NO: 276716 - protein, 110 aa, Glycine max
  unsure (1)..(110): unsure at all Xaa locations
  Clone ID: PAT_MRT3847_91895C.1.pep
XXSRXNRMHTXVKXGIXXEXXPXXXXXXXXXXXXMXXXXXXXXXERXXXXADPXXXXXXPXQSXTXXXGSXXPXLXRXXXPXLKPRSXXXVXXPTAXCXXVAXPXXXXAL

SEQ ID NO: 276717 - protein, 135 aa, Glycine max
  unsure (1)..(135): unsure at all Xaa locations
  Clone ID: PAT_MRT3847_91896C.1.pep
FKSQEMSFTIDRSQRSSGKYHCWQCISASLQKTRDRETALDAGLYITWRKFYAARQINRLETPLPPPQPHNLRHRXRHRRRGVSQIDAFQHAVCLIRPDVLTGPVEHLLQLPKTQGHAHDQHLTMAHHAHFAPGI

SEQ ID NO: 276718 - protein, 52 aa, Glycine max
  Clone ID: PAT_MRT3847_91897C.1.pep
DMEKSRIQIPTNNKKKLATKSLVELLSIEGVTTGLAYCLWTKMPIVPRTFVV

SEQ ID NO: 276719 - protein, 154 aa, Glycine max
  unsure (1)..(154): unsure at all Xaa locations
  Clone ID: PAT_MRT3847_91898C.1.pep
FLVLDLESHTMQATTDAYAELAPATAELNVSXDTYSADIPAEAYKTLTSLNGGTAYGXESPRATHTLELIKGVLPRGKYLIAGVNDGPNICANDLAACLPTLQGLEGIGCKDXLDESTCSYLLHTAVDLVTETKLDDDIKCCVPHAAPENGATY

SEQ ID NO: 276720 - protein, 61 aa, Glycine max
  unsure (1)..(61): unsure at all Xaa locations
  Clone ID: PAT_MRT3847_91899C.1.pep
CGTLAHMVMVLVALPALADTCAMMQLPIGLFISVLITWGQARKGHFXTIGSGQFNVFFSYF

SEQ ID NO: 276721 - protein, 99 aa, Glycine max
  Clone ID: PAT_MRT3847_9189C.1.pep
KKGGPNKWSSVEVYPQFNPATMVLLGLFLAPKVLRDRLRACLVQRWGFFHMVLGYPTPVGLMVRCPPTSFFGQGFPFNKVLSKKKVGFPFKLPFSGWGI

SEQ ID NO: 276722 - protein, 84 aa, Glycine max
  Clone ID: PAT_MRT3847_918C.1.pep
VRWMPSISVYMYIAQHCFPLCHELKALTSATNNSYFIYNPHDNAANSFVKFGLSMKQQASIFSACPSFCQPFIPKYRQMLGKSV

SEQ ID NO: 276723 - protein, 47 aa, Glycine max
  Clone ID: PAT_MRT3847_91900C.1.pep
TSVRGCPARKHVERAVDDSNMLVVTYEGEHNHSQIASEVANVILESS

SEQ ID NO: 276724 - protein, 48 aa, Glycine max
  Clone ID: PAT_MRT3847_91901C.1.pep
NLSRNTPHNRFTFTLFGFTPNSPFDFTLSHYDAVICLARLALLPYSCS

SEQ ID NO: 276725 - protein, 475 aa, Glycine max
  unsure (1)..(475): unsure at all Xaa locations
  Clone ID: PAT_MRT3847_91902C.1.pep
MALKTGSVEMFFFPFVGGGHQIPMIDTARVFASHGAKSTILVTPSNALNFQNSIKRDQQSGLPIAIHTFSADIPDTDMSAGPFIDTSALLEPLRQLLIQRPPDCIVVDMFHRWAGDVVYELGIPRIVFTGNGCFARCVHDNVRHVALESLGSDSEPFVVPNLPDRIEMTRSQLPVFLRTPSQFPDRVRQLEEKSFGTFVNSFHDLEPAYAEQVKNKWGKKAWIIGPVSXCNRTAEDKTERGKLPTIDEEKCLNWLNSKKPNSVLYVSFGSLLRLPSEQLKEIACGLEASEQSFIWVVRNIHNNPSENKENGNGNFLPEGFEQRMKETGKGLVLRGWAPQLLILEHVAIKGFMTHCGWNSTLESVCAGVPMITWPLSAEQFSNEKLITEVLKIGVQVGSREWLSWNSEWKDLVGREKVESAVRKLMVESEEAEEMTTRVKDIAEKAKRAVEEGGTSYADAEALIEELKARRLARQD

SEQ ID NO: 276726 - protein, 52 aa, Glycine max
  Clone ID: PAT_MRT3847_91903C.1.pep
NPLPSHIIIKGDNFILFFTIFFYFTSNQYIYTQVTTCDKKNKIIHRHKLILK

SEQ ID NO: 276727 - protein, 80 aa, Glycine max
  Clone ID: PAT_MRT3847_91904C.1.pep
AAQAAGGFSFLFFLKAWLLHEYESMKYQRISISDMVYVNQIEVQCFIGCLLFKSYEIIMAKGKLMKSFGEASEHKMLVRI

SEQ ID NO: 276728 - protein, 158 aa, Glycine max
  unsure (1)..(158): unsure at all Xaa locations
  Clone ID: PAT_MRT3847_91905C.1.pep
MEFDEQEEHEEEEMVMPEPAAVSAPPSYDSLGNSGAMSKLGGGEGRKTALGAAAAAVRYRECQKNHAVSFGGHAVDGCCEFMAAGEDGTLEAVICAACNCXHRNFHRKEIDGEITLFHYRAQPSPPPMHHHHQFFPYYHHRVPQHPAVACFLHHHLTP

SEQ ID NO: 276729 - protein, 111 aa, Glycine max
  unsure (1)..(111): unsure at all Xaa locations
  Clone ID: PAT_MRT3847_91906C.1.pep
NKXXGXLLQPXLXXXXDQXPXAXYIXNXXLMAXXSPLXGXEKXGXXXTQKGXWIXQNXAAXLXXXXXXIXCSXGLRXXRDXPTVXAKXTNLXLEPLEPLXPNSELTYXXXL

SEQ ID NO: 276730 - protein, 95 aa, Glycine max
  Clone ID: PAT_MRT3847_91907C.1.pep
MMMKSAMCAAVAVALIILSEVGPMAEAVTCTPTELNPCVSTITFGAKPFNACCTKLNQQKPCLCGYLKNASLKQYVNSPNAPKNVSYCEIPFPTC

SEQ ID NO: 276731 - protein, 276 aa, Glycine max
  Clone ID: PAT_MRT3847_91908C.1.pep
MAATFFSHLSLLQSNNNNSPSLSPTPSRISHSLTNRVKPSLCGVSVGKRASGLVPKATLNAVEAISANKKSNNNPIVVIDNYDSFTYNLCQYMGELGFHFEVYRNDELTVEELKRKNPRGVLISPGPGAPQDSGISLQTVLELGPTVPLFGVCMGLQCIGEAFGGKIVRAPHGVMHGKSSMVYYDEKGEDGVLAGLSNPFLAGRYHSLVIEKGSFPDDELEVTAWTEDGLIMAARHKKYKHLQGVQFHPESIITPEGKTIVHNFVKLIERSEAVGS

SEQ ID NO: 276732 - protein, 278 aa, Glycine max
  Clone ID: PAT_MRT3847_91909C.1.pep
MAATFFSHLSLLQSNNNPSLSHTPSRFPHSLTNRVKPSLGVVSVAKRVSGVVPKANLNALEANSGFPISAKKSNNNPIVVIDNYDSFTYNLCQYMGELGFHFEVYRNDELTVEELRRKNPRGVLISPGPGEPQDSGISLQTVLELGPTVPLFGVCMGLQCIGEAFGGKIVRSPHGVMHGKSSMVYYDEKGEDGLLAGLSNPFLAGRYHSLVIEKESFPHDELEATAWTEDGLIMAARHKKYKHLQGVQFHPESIITPEGKTIVRNFVKLIEKREAGGS

SEQ ID NO: 276733 - protein, 428 aa, Glycine max
  Clone ID: PAT_MRT3847_9190C.1.pep
IIPFFLSLSLTHPHDVKSCYFLFIPIISPDHVLTALFLLYRFNNSSGFSLPLTLLFPNHSPIWVHFVLHLNKKRNLEDSILCKHTVHSTVTKKLISPKKSSQTNSSTERTIVRISYTDPDATDSSSDEEGFPLVRQRMKRYVNQIEIETAFAEKVVRKRPAGEPCRRPAKLHSGKKFRGVRQRPWGKWAAEIRDPARRVRLWLGTYDTAEEAAMVYDNAAIRLRGPDALTNFVTPPQRDSPSPSPPPAAAETPAEVCDMKVVVTEEASGSGYDSSEDHCHHNLSSPTSVLQFRSNSSEENSESQQKAEQVLRECEGETETSLFEETGEFLALDNMPLPAWDDVFNFETPEYPPLLFQEEENLNLLHQSQMLGETVQFSSEEGFSDESSIMLADSLIDFDRACPSPSSLCQVDDFFQDILFASDPLVLL

SEQ ID NO: 276734 - protein, 354 aa, Glycine max
  unsure (1)..(354): unsure at all Xaa locations
  Clone ID: PAT_MRT3847_91910C.1.pep
MEWVKMKGYAREFMVGVAEMTVEFGKGCRDIVKQSLVNDDSYIVKNFGRDSYIGKTVTEPFANLFQKLSFFNEYLPEDKDPLHAWSVIFFVTTHASXNFECDPYAAAAPVKQVFVHPPSATRVVLPDGRYMAYKEQGVSSHKARFSVIAPHSFLSSRLAGIPGVKDSLLQEFGIRLLTYDLPGFGESDPHPNRNLESSATDMAFLANALGVDKFWVVGYSSGSMHAWAALRYIPDRLAGAAMFAPMVNPYDPIMTKEERRRTWNKWTRRRKFMYFLARRFPRLLAFFYQQSFLSGKHGQIDRWLSLSLGNRDKALMEDPMYEEFWQRDVEESIRQRNVKPFMEXXACXRKWGSA

SEQ ID NO: 276735 - protein, 87 aa, Glycine max
  Clone ID: PAT_MRT3847_91911C.1.pep
ALIWPLNSLLVNALRKSEKVKDAYSFLEEMVCGEFTPKPSTLKKLAGELESKSMLEEKVRVEEWMDRFSQNLIRPGLSDRSDRDPVT

SEQ ID NO: 276736 - protein, 145 aa, Glycine max
  Clone ID: PAT_MRT3847_91912C.1.pep
MGKGKPRGLNAARKLRNHRREGRWADLHYKKRLLGTAFKSSPFGGSSHAKGIVLEKVGVEAKQPNSAIRKCVRVQLIKNGKKVTAFVPNDGCLNFVDENDEVLLAGFGRKGKAKGDIPGVRFKVVKVSGVGLSALWKEKKEKPRS

SEQ ID NO: 276737 - protein, 139 aa, Glycine max
  unsure (1)..(139): unsure at all Xaa locations
  Clone ID: PAT_MRT3847_91913C.1.pep
CLMPLDEEIFCKVAQDMGAEWTDCVDEEATSAEGSFSAALNGDGGLHSMERNTLATSQGCSHVLSHKNGEKGPRRFVHVDGAXMTLIPRTSVXEAYYKLTAALEKSVPTLTGIDCSKDXKLSRHKIFDEPKTRCYTILP

SEQ ID NO: 276738 - protein, 198 aa, Glycine max
  unsure (1)..(198): unsure at all Xaa locations
  Clone ID: PAT_MRT3847_91914C.1.pep
ARGRMHSSKFSSTDSCDLLICDEAHRLKNDQTITNRAFAGESCQCPVXIVCKRRILLSGTPLQNDLEEFFAMVNFTNPGILGDIAHFRRYYEAPIICGREPAATAEEKKLGAEQSAELSVNVNRFILRRTNALLSNHLPPKIVEVVCCKLTPLQSELYKHFIQSKNVKRAITVELKQSKILVYITALKXLCNHSKLIL

SEQ ID NO: 276739 - protein, 40 aa, Glycine max
  Clone ID: PAT_MRT3847_91915C.1.pep
FSFPLLVYYLNTLLFDIGLRVTIKLLLNLSQFSDEFQIQV

SEQ ID NO: 276740 - protein, 74 aa, Glycine max
  Clone ID: PAT_MRT3847_91916C.1.pep
STSLLSTSVTFCFLLLPPSLLLPSSLPSLQLPSSLKRLLPLSSPSALSSVFFFSGSGLGAVKLMGVERFLNQPF

SEQ ID NO: 276741 - protein, 158 aa, Glycine max
  unsure (1)..(158): unsure at all Xaa locations
  Clone ID: PAT_MRT3847_91917C.1.pep
XKGVELCGTLXKNVVAIAAGFVDGLEMGNNTKAAIMRLGLREMKAFSKLLFPSVKDSTFFESCGVADLITTCLGGRNRKVAEAYARNGGKRSFDELEAEMLQGQKLQGVSTASEVYEVLSHRGWLELFPLFSTVHEISTGLLPPSAIVEYSEKLPRSF

SEQ ID NO: 276742 - protein, 87 aa, Glycine max
  Clone ID: PAT_MRT3847_91918C.1.pep
AVVVRCSAASRPPCSSGSSGPFAPFLISSYAFLWICFACAWSPFFLLPPPCFACWFPCSLVLLSRSSFLNIWFGLQPGRFGPAAAAV

SEQ ID NO: 276743 - protein, 227 aa, Glycine max
  Clone ID: PAT_MRT3847_91919C.1.pep
MDSLKMLKGYGKVEHHLEDHRNPKPKPKFSKPFIAAISVFAILFLTLTFAFALASMLHHSHHTESQQQLLNSAESIRVVCNVTRFPGACLAAIPPSANATNPQAILSLSLRASLHALQSLNSSLGTKNSRALADCRDQLDDALGRLNDALSAAAALTEAKISDVQTWVSAAITDQQTCLDGLEEVGDVAAMEEMKKMMKRSNEYTSNSLAIVANIRNLLQRFHMALH

SEQ ID NO: 276744 - protein, 88 aa, Glycine max
  unsure (1)..(88): unsure at all Xaa locations
  Clone ID: PAT_MRT3847_9191C.1.pep
SDLKKHXDTWSDSANDPLPCIMALTRILCGMAYCHLHIKPHRDLKQHNFEIDRITDPLKRAKSGSAPAMIIPIMTFTHIVTTLNHISP

SEQ ID NO: 276745 - protein, 55 aa, Glycine max
  Clone ID: PAT_MRT3847_91920C.1.pep
MLNYSHVQDLKLLLTYSHKNKCYYLQTSPSSWSLILVTFLSSTAFIQPKEIRKKE

SEQ ID NO: 276746 - protein, 219 aa, Glycine max
  Clone ID: PAT_MRT3847_91921C.1.pep
MADGVVLLDTWASMFGMRVRIALAEKGVEYEYKEENLRNKSPLLLQMNPIHKKIPVLIHNGKPICESAIIVQYIDEVWNDKAPILPSDPYERAQARFWVDYIDKKVYDTWRKMWLSKGEEHEAGKKEFISIFKQLEETLSDKAYYGSDTFGFLDIGLIPFYSWFYTFETYGNFKMEEECPKLVAWAKRCMQREAVSKSLPDEKKVYDYVVAVTKVLESN

SEQ ID NO: 276747 - protein, 106 aa, Glycine max
  Clone ID: PAT_MRT3847_91922C.1.pep
GGGVFFFFFFFFFFFFFFFFFLKKITGLPPPREKNTKAPKGGGVIFLPQKKILGGGGTNQGETQLTESSKRRGGKQTRGKTGGQKLPPLRQPKKTDPQLKKVKTPK

SEQ ID NO: 276748 - protein, 57 aa, Glycine max
  unsure (1)..(57): unsure at all Xaa locations
  Clone ID: PAT_MRT3847_91923C.1.pep
SRVDPRLREQASXIAAVNSQLPFTXSIALTVFAATPPGPDNVLTKGCQGGTKGGGEN

SEQ ID NO: 276749 - protein, 61 aa, Glycine max
  Clone ID: PAT_MRT3847_91924C.1.pep
HTYNHSFFNKYGSNNNCHAAAFIHTKNLILTRPNHTFFFFFNNIIPSFYYQFQPKFSYSIS

SEQ ID NO: 276750 - protein, 31 aa, Glycine max
  Clone ID: PAT_MRT3847_91925C.1.pep
LNLVIIFPKHLTFCLSTTLYVFINNKYTSHK

SEQ ID NO: 276751 - protein, 68 aa, Glycine max
  unsure (1)..(68): unsure at all Xaa locations
  Clone ID: PAT_MRT3847_91926C.1.pep
GAGENSLRVLLDRIFFGDYHLIWFCCILKKLLIFLLHGSFEVTYGXPPFGXQSLMTIHAFLGXXLVHS

SEQ ID NO: 276752 - protein, 63 aa, Glycine max
  Clone ID: PAT_MRT3847_91927C.1.pep
PVPWDMYEHRIHNYLAFSKKSVGRHRHSLNWSNMKALPIIVSALIVRKRHVPVTPWTMKPSST

SEQ ID NO: 276753 - protein, 358 aa, Glycine max
  Clone ID: PAT_MRT3847_91928C.1.pep
MATSLTLFKTTFVFFIIFTLLTHQATADCEAESKNSCNNKEKALPLKIIAIFTILASSIIGITLPLVTRSVPALSPENDLFIIVKCFAAGIILGTGFMHVLPDSFAMLWSDCLKEKPWHEFPFSGLVAMFSAIITMMVDSLATSVYTKKCRTTSEVVPGESSLEGGEENLEMGAVNLGHFHGHHHAHHETKMDGKESQLLRYRVVAMVLELGIIVHSVVIGLGMGASNNTCTIRGLIAAMCFHQMFEGMGLGGCILQAEYKFLKKAIMVVFFSITTPFGIALGIAMSTTYKENSPSALITVGLLNASSAGLLIYMALVDLLSADFMSPRLQGSIKLQLKSYVAVFLGAGGMSLMAKWA

SEQ ID NO: 276754 - protein, 182 aa, Glycine max
  unsure (1)..(182): unsure at all Xaa locations
  Clone ID: PAT_MRT3847_91929C.1.pep
MALKTLSTFFSPLSLPNTKFLTSKPCLILFEFPRSQKSRLPVAYAESTGAAAPSPGEKFLERQQSFEDAKLILKENNKNKKKKKKDNAIKASRAVASCYGCGAPLHTSDADAPGYVDPETYELKKKHHQLRTGLCXXCXLLXHGKMITXAVXGHXGYPGXKIFGSAEKLRXKIGSTGVRGKL

SEQ ID NO: 276755 - protein, 102 aa, Glycine max
  Clone ID: PAT_MRT3847_9192C.1.pep
AQQIPEIITTTFLIPVIATFIVMRSQTHTQTATPLTIVRAITTIAPTIATPITLLHLLRIAHRHRHLNHLLQPACVAPTSTITMCRSHPPCCNRVLTPRPHP

SEQ ID NO: 276756 - protein, 180 aa, Glycine max
  Clone ID: PAT_MRT3847_91930C.1.pep
GVEPGSTVAIFGLGSIGLAVAEGARLCGATRIIGKKFGVTDFVNAGECGGKPVGQVIIEITDGGADYCFECVGMASLVHEAYASCRKGWGKTIVLGVDKPGARINLSSYEVLHDGKSLMGSLFGGLKPKSHVPILLKRYMDKELQLDKFVTHEVEFKDINKAFDLLSKGECLRCVIWMDK

SEQ ID NO: 276757 - protein, 249 aa, Glycine max
  Clone ID: PAT_MRT3847_91931C.1.pep
MPPRDRKATQGSPTLPSTIVAVDGDGFIARYITFENISGHQKHQAVAVRSGADHSVFYRCSFRGYQDTLYVYANRQFYRDCDIYGTIDFIFGDAVTVLQNCNIYVRKPMSNQQNTVTAQGRTDPNENTGIIIHNCRITAAGDLKAVQGSFRTFLGRPWQKYSRTVVMKSALDGLISPAGWFPWSGNFALSTLYYAEHANTGAGASTGGRVDWAGFRVISSTEAVKFTVGNFLAGGSWIPGSGVPFDEGL

SEQ ID NO: 276758 - protein, 145 aa, Glycine max
  Clone ID: PAT_MRT3847_91932C.1.pep
ISIFSRIPSAFTMWTLRRASLGLSTRRGVNAGASRASAVKLVATTSEENEAGIPQSRQITYGRFLSAGMGRVSLKFAVGRHELSSQAGASSTKDDDDDLEIHGSNDESDADLSDGDEDGEKPHDELELSDAEIDPTKKKSQARWT

SEQ ID NO: 276759 - protein, 96 aa, Glycine max
  unsure (1)..(96): unsure at all Xaa locations
  Clone ID: PAT_MRT3847_91933C.1.pep
HFEACKWPKSAPHSWGLIFPIEVCGPNNGFEMCSYEWANQTSRHLSFCXTTPHEYTVFDIVLGISRDFGSSGNTRRSAVCVAQGKDGSSVNAQSSA

SEQ ID NO: 276760 - protein, 87 aa, Glycine max
  Clone ID: PAT_MRT3847_91934C.1.pep
LITQTRNPFLFYPPSLLSRFPPIVDYYYYCCCCCCCCCCLLPPAPSIPRYFFHSLFNPTPHLLIFHVPSYPSSHLFPINSLSVLPHL

SEQ ID NO: 276761 - protein, 138 aa, Glycine max
  Clone ID: PAT_MRT3847_91935C.1.pep
HQGEKSTKKVSVEGGKSKKKKKKKKGDAAAQDSSDKENVACENGGNSNDGSVVLLNETVIANLQRQFEKVAEEAGLDDGVASACDSPQAASATGGTVSKKRKRTKSLKGKASQDSADLDGEESAVAKSGEKKLKSRAA

SEQ ID NO: 276762 - protein, 256 aa, Glycine max
  unsure (1)..(256): unsure at all Xaa locations
  Clone ID: PAT_MRT3847_91936C.1.pep
MKLEPQGLLPCTPAWCLWSKWRLSLLPFAQLGVRPRYARIWSLMISPLLKKLVMESGFGKLPIFEVEATIDIALDCMASLLKKVEANQASFCSASWVTMIFPFLVSDVHHXVFLRILSCLIIEDTSQAHPEELGMLVEVLKSGMVTSASGSQYRLSLDAKCDYGXYWWILGVNNSAQKVLCEATSFSLLLTTLHGFQSDGGDLDQSSFNVYIKGRHESSQNSLPLVHSFSNTCYLSWRDTEHKICETKYSFTARNL

SEQ ID NO: 276763 - protein, 541 aa, Glycine max
  Clone ID: PAT_MRT3847_91937C.1.pep
MEEQASQIGRSLVKQLACCKKTTRDKSLRLLLKSWLPSQSQPLSDDDAKKLWKGLFYCMWHSDKPLVQSDLVDRLSSLLLSLHLSVSLQYLSTFLLTMRREWSGIDALRLDKFYLLIRRFVSKLFSLMKTNSWDLLLVQRLMNVFDEGTLSAQDNKSHGNGVNYHIATVFLEELRPFLPLKQQVLEVLLKPFVSAMGRVHDKVLVGKIRSGVFDLLLKMGKRLLEVKKSGVEVEVDSRDEVVLIGTVALVMGFSGRLYEVGSSAECIQGNRKVLFALHSEFLKLEKESVNSGFEFVIPDFVVDEEEEEVPELVPLGPAEVAGNGEVLKKCKKDKKVSVEGGKSKKKKKKKKGDAAAQDSSDKENVACENGGNSNDGSVVLLNETVIANLQRQFEKVAEEAGLDDGVASACDSPQAASATGGTVSKKRKRTKSLKGKASQDSADLDGEESAVAKSGEKSTKKVRFSMINNLVWKPHNPLPPQSLRLPPSATPRGSALKKGVPPGPIREMPLPTKKPKLKRARKAIKGVAPVKRLKKLKSRAA

SEQ ID NO: 276764 - protein, 78 aa, Glycine max
  Clone ID: PAT_MRT3847_91938C.1.pep
MAPRKGKEKKEEQVISLGPQVAEGENVFGVCHIFASFNDTFVHVTDLSGKETICRVTGGMKVKADRDESSPYAAMLAA

SEQ ID NO: 276765 - protein, 99 aa, Glycine max
  Clone ID: PAT_MRT3847_91939C.1.pep
GFGQKIPVKFWPQNPGDGPGGFAFPKKVGKKLGWGAPFWVGGMSRAPRNWAKNPPRGFRGGPFISFGKKWVFSEGFFPKKGLFLKKTFPWGDFFRPVRG

SEQ ID NO: 276766 - protein, 97 aa, Glycine max
  unsure (1)..(97): unsure at all Xaa locations
  Clone ID: PAT_MRT3847_9193C.1.pep
RCVKVPLCIAHALAAPTEILLIKDPCPLPXPEILNMDRIHALTTDTVDLENAWNFNDLGIGTYKLKRYPIEYIISYTKGGSQFGSTIKDRVTLYSCT

SEQ ID NO: 276767 - protein, 197 aa, Glycine max
  Clone ID: PAT_MRT3847_91940C.1.pep
ISSSDTHQTPSIPLTQPHERGLQFQNSVAVVVLILLPFEFQEFELFQIVGDKRGSSHAGHGARKRVKMKDLDAVVHSVETNSRYSGFKNDKENTVQWSLGATDGSQQAKTGRKAMSEEFNFAARPLDLNTDVCKSGGCEKQEKGHANLVVSRGINVDLNVEDVTSPVNLEAANSSKGHNPFKSKDVSESGSCVGPLG

SEQ ID NO: 276768 - protein, 84 aa, Glycine max
  Clone ID: PAT_MRT3847_91941C.1.pep
LLFIFNFHPKDSYDSYSIGVEEAGEYQIILNTDEIKYGGQGILKEEQYFLKTISRRVDGLRNCLEVSLPSRTSQVYKLRRILRI

SEQ ID NO: 276769 - protein, 59 aa, Glycine max
  Clone ID: PAT_MRT3847_91942C.1.pep
HKILFSITVLEHCLPKEHLLPSAMTLNTENRILFPKEKYAQNHDILTTVLIVTIALNKV

SEQ ID NO: 276770 - protein, 50 aa, Glycine max
  Clone ID: PAT_MRT3847_91943C.1.pep
PITIGRRTNLAFSELLSTIDCKHLLTTFNTYMYYYKCSTHICLQQNPSTQ

SEQ ID NO: 276771 - protein, 99 aa, Glycine max
  unsure (1)..(99): unsure at all Xaa locations
  Clone ID: PAT_MRT3847_91944C.1.pep
MTGETVNPQAYPFGRWPHXLIXPXXILVQQVANXKXFXXRXNGGHXNPEKRXXGIXXKVLILDPWNFLPIPXIGGGXXVPXXXSLXXKXLGCMLGXQXX

SEQ ID NO: 276772 - protein, 45 aa, Glycine max
  Clone ID: PAT_MRT3847_91945C.1.pep
LLMEKQITEFQYQNTNVANQFKQQRPLLTCSHFSFTIQILTMYLR

SEQ ID NO: 276773 - protein, 59 aa, Glycine max
  Clone ID: PAT_MRT3847_91946C.1.pep
PLTLRYSLCQTFAVQAYDGVGSTPDGGGLQDPSLAVAAGSEPNGRLLRHLRRRSDRPRT

SEQ ID NO: 276774 - protein, 232 aa, Glycine max
  unsure (1)..(232): unsure at all Xaa locations
  Clone ID: PAT_MRT3847_91947C.1.pep
MEELSAGPLVPAVVKPEASKGAAVAADTSEGXASGGTFPASTSEPDKDFLCPICMQIIKDAFLTACGHSFCYMCIITHLRNKSDCPCCGHYLTNTNLFPNFLLDKLLKKTSARQISKTASPVEHFRQALQKGCDVSIKELDTLLSLLAEKKRKMEQEEAERNMQILLDFLHCLRKQKVDELNEVQTDLQFIKEDINAVEKHRMELYRARXRYSXKLRMLDDSGGRKSWHSSM

SEQ ID NO: 276775 - protein, 671 aa, Glycine max
  unsure (1)..(671): unsure at all Xaa locations
  Clone ID: PAT_MRT3847_91948C.1.pep
MEELSAGPLVPAVVKPEPSKGASAAASGGTFPASTSEPDKDFLCPICMQIIKDPFLTACGHSFCYMCIITHLRNKSDCPCCGDYLTNTNLFPNLLLDKLILLKKTSARQISKTASPVEHFRQVLQKGSDVSIKELDTLLSLLAEKKRKMEQEEAERNMQILLDFLHCLRKQKVDELKEVQTDLHFIKEDINAVEKHRMELYRARDRYSVKLQMLDGSGGRKSWHSSMDKNSSGLGCEKTTEGGGLSSGSHTKKNDGKSHISSHGHGIQRRNVITGSDSQYINQSGLALVRKKRVHTQFNDLQECYLQKRRHAADRSHSQQERDISLISREGYTAGLEDFQSDIISFTCNSRLRXLSELRHGDIFHLAKIISSIVYFRDDDLFASAXVSRRIKVVHYSAFMIEPREAHYSDLEKSTHSKRSCFCRNKFGKNQIACNCYDRFVSDXDVIIQKSLIDYKEHXKGVWILVSSXTDPSMLVTGRIDSNVKICFTNQEASVLNIDMKANICCVKYNPGSGNYIAVGSADHHIHYYDLRNISRPVHVFSGHRKAVSYVKFLSNDELASASTDSTLRLWDVKENLPVRTFKGHANEKNFVGLTVSSEYIACGSETNEVFVYHKEISRPLTSHRFGSPDMDDAEDEAGSYFISAVCWKSDRPTILTANSQGTIKVLVLAA

SEQ ID NO: 276776 - protein, 111 aa, Glycine max
  Clone ID: PAT_MRT3847_91949C.1.pep
MEQGVEEGGGMNKIPRDSRVKEIRQGDAQIQVQAPQQPQKCPRCDSLNTKFCYYNNYSLSQPRYFCKTCRRYWTQGGTLRNVPVGGGCRKGKRAKSSNSSSSENMNSSSRS

SEQ ID NO: 276777 - protein, 68 aa, Glycine max
  Clone ID: PAT_MRT3847_9194C.1.pep
PTVSVYEYRFFFFFFIFWITLGVLLIMQEYPAIVICGMLFCFIVMALVGVEFDIGSHTSYSCSHCRLM

SEQ ID NO: 276778 - protein, 86 aa, Glycine max
  unsure (1)..(86): unsure at all Xaa locations
  Clone ID: PAT_MRT3847_91950C.1.pep
MGKRVHCPTTYSGLIAMTAGEDTVDGSLXVGIGDVDKRKRTYYLNADSAGSGKSSDEAFIECTIAEAVAIVLYXQYVANMIRLLGD

SEQ ID NO: 276779 - protein, 135 aa, Glycine max
  Clone ID: PAT_MRT3847_91951C.1.pep
MFGSINQIVSAEDTDGPVSDHHIHYSSHTIEDDGAASDHHIHYSSHTIEEDGAASDHHIHYSSHTIEDDGAAVEDVSAVPGPEISIDNSSQLTLSFRGQVYVFDAVTPDKVQAVLLLLGGNELTGSQCAELSSRN

SEQ ID NO: 276780 - protein, 122 aa, Glycine max
  Clone ID: PAT_MRT3847_91952C.1.pep
LAKCGFLPLSRFISEVNAIKRRITRFEMHQTLKLLQGEISQLSEYNPLDLFSGSKERILKAIKGLLTTPQNNFRVFLNGSLILGGLGGVAKNTDVCIAKAFEDELKSIIRADDDLCTNNLST

SEQ ID NO: 276781 - protein, 97 aa, Glycine max
  Clone ID: PAT_MRT3847_91953C.1.pep
SGKKPKGTKEKPPVLTNSFPGSVYLGKTKTPPTEIYLPGKKLPLTFYPFGKLPKVNKAPPFPGGLPQLPFLIQHGSLGQFNKNFPFPNKNKSQRGHP

SEQ ID NO: 276782 - protein, 61 aa, Glycine max
  Clone ID: PAT_MRT3847_91954C.1.pep
YTVYIREIFNQWIFKISLNMKIYSFLGRTELSLKLVGGINLIEIALMLNLIILNNFEIFFK

SEQ ID NO: 276783 - protein, 270 aa, Glycine max
  Clone ID: PAT_MRT3847_91955C.1.pep
RTNRATQAGYWKATGKDRPVHSQKKQVGMKKTLVYYRGRAPHGIRTNWVMHEYRLIESVPGTALSSLKDSYSLCRIFKKTIQIPAKPNNNEEEQPEIANKKESMWISEEQMLGEDSSGTEISREMENVDEKILNHEHPKFPCDASSSDLTQGACTPTDTGIAEDFQPQFACDEANSAANSYTMGIGYSTNIFQDVEMPSYADMHYQLPYTPLVMEDFPQINLPETKTTKPEVTDDCMLYDRYRDCMNGTLEEIISLCCTQDNSVPFPMLE

SEQ ID NO: 276784 - protein, 465 aa, Glycine max
  Clone ID: PAT_MRT3847_91956C.1.pep
PDLAKAAEYTEKQLLINVSAQLSLTGKGYSNFSVLFLEGLYDPHVGKLYLIGCRDVRAPWKVLYQSYDLEAGMDCLIQVVVAYPPTTTRWLVDPRATISIESQRTDDDALRFDPIKLKTFPLIYRKQREDVLSRRGVEGILRILTLSFAIGCILSQLFYIQKNVDSLPYISLVVLGVQALGYSIPLVTGAEALFKKMVSESYDVSPSELESSEWLHVIDYTVKLLLIVSLLVTLRLFQKVWKSRIRLQMRTPLEPHGVPRDKLIFLCTFTIHVIGYVIVLIIHGTKTSQKALIAKTYLVDGGNSHSLPGWETELEEYVGLVEDFFLLPQIIGNLIWHINCKPLRKLYFIGITLVRLLPHIYDYIRAPVSNPYFYEESEFVNPNLDFYSKFGDIAIPVTAIVLAIVVYIQQRWGYEKLSQFLTFGRYKILPTFRYQRLSSRAGESELVPGINGAAAAKENEQVDVE

SEQ ID NO: 276785 - protein, 120 aa, Glycine max
  Clone ID: PAT_MRT3847_91957C.1.pep
CPRPCWAPSGPRCPESWATFLVSGLMHELIFYYVTRVSPTWEVTCFFLLHGVCAVAEFGAVKWLGAKWRLHWALCGPITVAFVIVTAAWLFFPPLMHDGTDERTIKEFNDVVECVMGKFY

SEQ ID NO: 276786 - protein, 90 aa, Glycine max
  unsure (1)..(90): unsure at all Xaa locations
  Clone ID: PAT_MRT3847_91958C.1.pep
NKKKKFFKKKNGLVRVKKCGGEHWGICIKKNRRLKTHQGRKKKRKNYRKKXPRKGGAPEESAPKKNKSQKKKKSWGKKNKGSPKREKKGV

SEQ ID NO: 276787 - protein, 138 aa, Glycine max
  unsure (1)..(138): unsure at all Xaa locations
  Clone ID: PAT_MRT3847_91959C.1.pep
XXXXXKXXXXXXXQTQNLNPISSLENGGEGAKPPXIKLLKDTXLKTNXTFKHLWNAGTPGGGKPPGIWGTPGPWGSGTQGFXPYKGRWXMRRAWGGXXGGIRXXPXGGKKWXXQLHKXPPKXXESPERXKKGKSAGGG

SEQ ID NO: 276788 - protein, 308 aa, Glycine max
  unsure (1)..(308): unsure at all Xaa locations
  Clone ID: PAT_MRT3847_9195C.1.pep
AGVTDSTPVHVAGDDIVFANVLPTRNTAHETTIEEEVCGSSIRECLDFLMRLFYKVVPWKTEPVETNSDPYHFEPVEATSHHFRMEDGVIHVYASKSDTEENPPVESSTRFFTXXLYILKVMSIGNVRTSCYHRLRFLEEXREFLAQKGAPHRDFYIXRKVDTHIHHSACMNQKHLVRFIKSKLRKESDEVVIFRDGKYMTLKEVFESLDLTGYDLNVDLLDVHADKSTFHRFDKFNLXYNPCGQSRLXREIFLKQDNLIQRRFLAEVTKEVXTDLEAXXYQMAEYRISVYGRXQSEWGQLASWFVNM

SEQ ID NO: 276789 - protein, 73 aa, Glycine max
  Clone ID: PAT_MRT3847_91960C.1.pep
ISPQKYWTISPYNWARTFKNTLQLQKTFGGAPGGKARGGSLLNPPFHFFFLGAGLIWFSLHPKMEKAGAPLYI

SEQ ID NO: 276790 - protein, 82 aa, Glycine max
  Clone ID: PAT_MRT3847_91961C.1.pep
SDAGRSFGDKSFPVRAYPVLAQVSLCCSEPKGTFPRVTHPSAADVLLRPLDLHVLSLPPAFALSQDQTLKLDLNFEPADHNV

SEQ ID NO: 276791 - protein, 84 aa, Glycine max
  unsure (1)..(84): unsure at all Xaa locations
  Clone ID: PAT_MRT3847_91962C.1.pep
TLIPTNKIIVCFVVVVHHNNPLYIQIFTDADDSLKLHHIFHCSLDVVDXRVNNPKKSWPILNETFFXLLYPIXNYKVFGYLTNT

SEQ ID NO: 276792 - protein, 101 aa, Glycine max
  Clone ID: PAT_MRT3847_91963C.1.pep
SMCTCFCSVNSGSALGLQSRSWQQRKLLLLQSVKWKLRRLPPITVSPLQHSVCTRLSREAGSQTDIIGICLLPVFCSHPPKKARVKKAVYSAVEDVVRSSF

SEQ ID NO: 276793 - protein, 140 aa, Glycine max
  Clone ID: PAT_MRT3847_91964C.1.pep
MPSKFRFLKLFTHRLSPRTAAANGSHRFLYGNPLCTMAESPELPPWLKFSDTPTPPDADSDDNFVIPSLAHWVDTHMLTTKPKVLTQSPKQDNLDELEAVTKVLQKRYPSPELASLALDGLSFQPSSGLVSQVLNRFSND

SEQ ID NO: 276794 - protein, 529 aa, Glycine max
  Clone ID: PAT_MRT3847_91965C.1.pep
MLSKFRILSLFTHRLSPRTAAAAANGSHHFLCTMAESPELPPWLKFSDTPTPPDADSDDNFVIPSLAHWVDTHMLITKPKVLTQSPKQDNLDELDAITKVLKKRYPSPELAALALDGLSFQPSSGLVSQVLNRFSNDWVPALGFFKWAKSLTGYRHSPELYNLMVDILGKCRSFDSMSELVEEMARLEGYVTLETMTKVMRRLARARKHEDAIEAFGSVRKFGVNKDTAALNVLIDALVKGDSVEHAHKVVLEFKGLIPLSSHSFNVLMHGWCRARKFDNARKAMEDMKELGFEPDVFSYTSFIEAYCHERDFRKVDQVLEEMRENGCPPNAVTYTTVMLHLGKAGQLSKALEVYEKMKCDGCVADTPVYSCMIFILGKAGRLKDACDVFEDMPKQGVVRDVVTYNTMISTACAHSREETALRLLKEMEDGSCKPNVGTYHPLLKMCCKKKRMKVLKFLLDHMFKNDISPDLATYSLLVNALCKTGKVADAYSFLEEMVLKGFTPKPSTLKGLAGELESLSMLKKKKRV

SEQ ID NO: 276795 - protein, 40 aa, Glycine max
  Clone ID: PAT_MRT3847_91966C.1.pep
TKSSGEDIPAPASSNILKYFLSSKLSPRFQLLIGVAVSSS

SEQ ID NO: 276796 - protein, 40 aa, Glycine max
  Clone ID: PAT_MRT3847_91967C.1.pep
RVRHRTWFMLSTVRTCKDLKKPLVEIGMPRITICLLSWLK

SEQ ID NO: 276797 - protein, 251 aa, Glycine max
  Clone ID: PAT_MRT3847_91968C.1.pep
MKSGLKNGWPSVVRLRLRDKSVTPFCIFSKVKSAGNIPGNTPVYLNVYDLTTVNGYMYWAGIGIFHSGVEVYGVEYAFGAHDYPTSGVFEVEPRQCPGFKFRKSIFMGTTNLDPFQIREFMERQSANYNGDTYHLIVKNCNHFCEDICYKLTGNSIPKWVNRLARIGSFCNCILPDALKTSTVQHDDPNFQGCDSEKRRLRTAFSCLSSISMPQKEVSMSSLFMHSHYKGCLPPWELKKSKKGTLKQKLED

SEQ ID NO: 276798 - protein, 156 aa, Glycine max
  Clone ID: PAT_MRT3847_91969C.1.pep
MRKKLDTRFPAARIKKIMQADEDVGKIAMAVPLLVSKALELFLQDLCDQTYEITLRRGAKTMNAFHLKQCVQTFNVFDFLKDIVSKVPDLGSSVATGDDHAVTKRRKVAGDDDNDSDEELKRNKKPEPGHSSGRGRGRGRGRGIRTVDQEIGFTCP

SEQ ID NO: 276799 - protein, 53 aa, Glycine max
  Clone ID: PAT_MRT3847_9196C.1.pep
KSEVFKFQNSRLLVLWESMLLYELSNPNSRLTKEVISKLEQGLQRNLPIFTQT

SEQ ID NO: 276800 - protein, 62 aa, Glycine max
  Clone ID: PAT_MRT3847_91970C.1.pep
SYGDITFLYVIDILGSKTNARGTQKSILREKLKRNPKMNQESCLTFLWGLETHILNRCFTCL

SEQ ID NO: 276801 - protein, 66 aa, Glycine max
  Clone ID: PAT_MRT3847_91971C.1.pep
ENLCTPNTQESPPLYRHHSCILHPHSLMPQWRAKYYRPIKTPPLYWPPLYKSLLYNPLVYKSTSPA

SEQ ID NO: 276802 - protein, 85 aa, Glycine max
  unsure (1)..(85): unsure at all Xaa locations
  Clone ID: PAT_MRT3847_91972C.1.pep
ETSSXSFSNLWXVLFFCFSHKXPTIPLXTXIPQCXXXAXAPXGXPTXFXXNXDFXWQXSISMXTXLXLAGDLCQSLETFFSXXXX

SEQ ID NO: 276803 - protein, 162 aa, Glycine max
  Clone ID: PAT_MRT3847_91973C.1.pep
KFLDKESSNEAGFPDQHALGESLNIEETGKESIQEGHPLEGATVKTLSTGVGSISLGSGVVTLTDISSRDILAQDFQIQEIMPCQEIQIQEGLNLMDKQEGTGIISNNSIEVSPDIRTRLGAYKHFVDLDDTQVALLEEAVKKYPHLWNTCEMCSERFQALM

SEQ ID NO: 276804 - protein, 343 aa, Glycine max
  Clone ID: PAT_MRT3847_91974C.1.pep
MASWWDLRPFFRFQSVRTRFQEFRTREVQLGSHTVSSHGYAVARTHKHDWLILLLLVLIVISLYIIHPFHRFVGKDMMTDLKYPLKSNTVPAWAIPIYVILLPIVIFLGVYIRRRDVYDLHHAVLGLLFSVLITAVFTEAIKNAVARARPDFFWRCFPDGKDVYDKWGDVICHGDQKVIKEGYKSFPSGHTSGSFSGLGFLSLYLSGKIKAFDRKGHVAKLCIVFLPLLVASLVGISRVDDYWHHWQDVFAGGLLGLTVATFCYLQFFPPPYHSEGWGPYAYFRMLEESRGMTQVPSVQNSGQAQLAEAQAESQEEQGLHGCMGLTLSRDHHAALNDCESGRG

SEQ ID NO: 276805 - protein, 211 aa, Glycine max
  Clone ID: PAT_MRT3847_91975C.1.pep
MASWWDLRPFFRFQSVRTRFQDLSSRRMGISAVTGAHFSSINFPLIDTKNEEEFRTREVQLGSHTVSSHGYAVARTHKHDWLILLLLVLIVISLYIIHPFHRFVGKDMMTDLKYPLKSNTVPAWAIPIYAILLPIVIFLGVYIRRRDVYDLHHAVLGLLFSVLITAVFTEAIKNAVGRPRPDFFWRCFPDGKDVCFPLIGFQFIFINYVGS

SEQ ID NO: 276806 - protein, 737 aa, Glycine max
  Clone ID: PAT_MRT3847_91976C.1.pep
MRELEYLKKELFKLKLDVASVMDQKSRAEKEIEASNSKMLSCLPMREEDRREIEEANEEQVLAELARIEASKELADIEAQREKEANQFSFNLEIARRKLKEAIEEIDESKELEMKLAVTISDVDFLQNELKSVKDMNKRVQGDGSVKQLEGIFRKGEEPEYSIVLQTITEELEAARKELALVREEGFQFMASMDVIRNELKHVTAETDRLKKKEGKVDSTVQNLNFKILRAKSKLEAVSAAEEKVRSIVMSLSHTLEKLKTETEDAKKENEDVSQEVAASKEEIQKVEFEIDMTEERLQGIMQELEVAKASEALALEKLKTLTETTMRERALTTQHSSMITISKFEYEYLTNHAASAQEIADKKVAAAEAWIEALKASEKEILMETKIAQRELKETKLEQEQEVYTKEKMLSRRVVSSSEEFDNWPRKREKSSSKNFQRAMSRKSIKLNGTITPARGAKFQKTASPAARHISPFTIKKRKKEFRTREVQLGSHTVSSHGYAVARTHKHDWLILLLLVLIVIGLYVIHPFHRFVGKDMMTDLKYPLKSNTVPVWAVPVYDKWGDVICHGDKKVIKEGYKSFPSGHTSWSFAGLGFLSLYLSGKIKAFDRKGHVAKLCIVFIPLLVASLIGISRVDDYWHHWQDVFAGGLLGLTVATFCYLQFFPPPYHSEGWGPYAYFRMLEESRGMTQVPSVQNSGQAQLAEAQAESQEEQGLHGCMGLTLSRDHHAALNDCESGRG

SEQ ID NO: 276807 - protein, 521 aa, Glycine max
  Clone ID: PAT_MRT3847_91977C.1.pep
KIRVFPVRPAWGHALIRMERYGHARVKFKQALQLHKGDPGPVILEIINTIEGGPPVDVSAVRSMYEHLAKSAPTILDDSLSADSYLNILYMPSTFPRSERSRRSQVSANNNSVYSRDFEDGPRSNLDNVRYTECVTYLKEYARQQLLAFMFRHGHYHDACSLFFPPDEVPPPPQPSITSGVSSSSPQRLDSLATDYGTIDDLCELCIVYGAMPILEEVLSTRMSSTQSQDAVNQYTVTALARICLYCETHKHFNYLYRFQVIKNDHVAAGLCCIQLFVNSSSQEEAIRHLEHAKMHFDEGLSARHKGGESTKVVTKGLRGKSASEKLTEEGLVKFSARVSIQVEVVKSFNDSEGPQWKHSLFGNPNDPETFRRRCKIAEVLVEKNFDLAFQLIYEFNLPAVDIYAGVAASLAERKRGSQLTEFFRNIKGTIDDDDWDQVLGAAINVYANKHKERPDRLIDMLTSSHRKVLACVVCGRLKSAFQIASRSGSVADVQYVAHQALHANALPVLDMCKQWLAQYM

SEQ ID NO: 276808 - protein, 83 aa, Glycine max
  unsure (1)..(83): unsure at all Xaa locations
  Clone ID: PAT_MRT3847_91978C.1.pep
FQHICLQSXSKIITISEEKWKEPKQWESSINCKNQEFFFSVISQSLDFVEVGFLILRYIQTSKLVQHICLVLLLLPGLKDWWR

SEQ ID NO: 276809 - protein, 158 aa, Glycine max
  unsure (1)..(158): unsure at all Xaa locations
  Clone ID: PAT_MRT3847_91979C.1.pep
ESLPLITHAKKPVNYPLTDHEAIPILNETHVLNHTKRLTDNTYPADILYISYFPGSHDNFHLLYDAQGLFRIHTXRYDVAHLLLSARVRPSRAYQKXLPYLETYNVLIIPKLYPHFXIYNSIKVYLDQNNICRCIKFYIEHDHIITSRRYLGCVGTLK

SEQ ID NO: 276810 - protein, 70 aa, Glycine max
  unsure (1)..(70): unsure at all Xaa locations
  Clone ID: PAT_MRT3847_9197C.1.pep
YGGAGGCYYGTTGGPGYETAAGYGVTPGGALPXAAYGKERRQQAPSHGAQNQKKGIMSPFKPPLPGGHTD

SEQ ID NO: 276811 - protein, 110 aa, Glycine max
  unsure (1)..(110): unsure at all Xaa locations
  Clone ID: PAT_MRT3847_91980C.1.pep
VKYNILEGKKIENENAAXQYALIRYQIIMAHVYLSIVKMTDTLQLSHELESQLKESQRASGQAPFXDLDCHHHDHEKTTTIGQFLSKATEQLLDLELPTGELMALLQPAM

SEQ ID NO: 276812 - protein, 55 aa, Glycine max
  unsure (1)..(55): unsure at all Xaa locations
  Clone ID: PAT_MRT3847_91981C.1.pep
CKSNARFVRWFNGSLQLFIGNRVFLYPVHDDKXFVPFLFLRHGKGILQSQGRLLR

SEQ ID NO: 276813 - protein, 69 aa, Glycine max
  Clone ID: PAT_MRT3847_91982C.1.pep
RDNEQAKWCSQWTSKPSSVWSSTSQVTHGRTRVYSTGSGGVSMAAYRAQIAHLCTRLISGSSSPAPKEP

SEQ ID NO: 276814 - protein, 86 aa, Glycine max
  Clone ID: PAT_MRT3847_91983C.1.pep
MKAAVLTLAVLFLTGSQARHFWQQDEPPQSPWDRVKDLATVYVDVLKDSGRDYVSQFEGSALGKQLNLKLLDNWDSVDSTFSKLRE

SEQ ID NO: 276815 - protein, 88 aa, Glycine max
  Clone ID: PAT_MRT3847_91984C.1.pep
VMMTHGNVLAALSAVMTIVPDIGTKAIYLAYLPMAHILELAAENLMAAVGVPIGYGSPLTFTDTSNKISKGTKGDATALRPTLMAAVP

SEQ ID NO: 276816 - protein, 86 aa, Glycine max
  Clone ID: PAT_MRT3847_91985C.1.pep
QLVSRHGLCCDQHRNLYCVRPNLRFLSSVWFQSDVPQWRPFLIYSIVYFLKWFWLTSISNVQFPNIGTNVVTGVCSRERKTATTRG

SEQ ID NO: 276817 - protein, 71 aa, Glycine max
  Clone ID: PAT_MRT3847_91986C.1.pep
HRKINQNSRHHFGASHQMSSSSCCLPPAERSKNYPHISHFLLILCILYIYIVFISWIYTHKFFTHKLYNER

SEQ ID NO: 276818 - protein, 99 aa, Glycine max
  Clone ID: PAT_MRT3847_91987C.1.pep
KSEFCTQHIGVKSSDSTLRFPIKAIKHKGDFRNIDWPNCSPYVGGNILVTSELVTTFSTIKAKTSPPNTGPGQAIQNTYQVQLTTGNPNGTHVIMARSH

SEQ ID NO: 276819 - protein, 91 aa, Glycine max
  Clone ID: PAT_MRT3847_91988C.1.pep
PPFFLGPSLGQIGGLEPLPPVKALPPGWVPPPIHPFYPDPPVVFFPVANFPPPPEIPVALSNFFGFGGPPFVGAFFAFRPFLPPLACFTFF

SEQ ID NO: 276820 - protein, 207 aa, Glycine max
  Clone ID: PAT_MRT3847_91989C.1.pep
NSARGDFGYAIQIFPFPLLAMDSMPDAILQCILSRITNARDVSSCNCVSKRWKDSTPYIRTLYFPRSSFETPSSSSEGADNIIKRMVSRVVKLEELIVYSPFSPDGLASWLSLAGQTLLQLELRMDNLADNRGFHESPSKLDYIGAAKNLESLKLWGVLMVRSPKWDVFPNLKNLEIIGVRLEDPVLSVVLRSCPVLTRLLLLGCEG

SEQ ID NO: 276821 - protein, 62 aa, Glycine max
  Clone ID: PAT_MRT3847_9198C.1.pep
AYWHHINRYAYQCTSSFEHTLPCYSASIIENPKIENDYQIIMPPITLDLLTFLLMDYPIMFQ

SEQ ID NO: 276822 - protein, 141 aa, Glycine max
  unsure (1)..(141): unsure at all Xaa locations
  Clone ID: PAT_MRT3847_91990C.1.pep
LQSYNLTYREENVDWLEIFRAAVVLMAWPCHGACYQRLPLRMKTGYGEPSSEVKCARFRLAVDAHNIRAFKTIPEECDEPTKDYIDGEQFRSDSKTVNQQALFYASERXGHHSDICIFDIDNSVLSNVRYYAXHGYGEEEF

SEQ ID NO: 276823 - protein, 55 aa, Glycine max
  Clone ID: PAT_MRT3847_91991C.1.pep
APEKESWNVLDLKKENYFSCAIGRTRTNARYILDSSDDVVSFLKELAVASSRLYH

SEQ ID NO: 276824 - protein, 59 aa, Glycine max
  Clone ID: PAT_MRT3847_91992C.1.pep
SPRASATMMSPVGSHIALLQLPLLPLKRYSTKEHHWGSSPNRKYLLMRRGVVSHPGDIR

SEQ ID NO: 276825 - protein, 49 aa, Glycine max
  Clone ID: PAT_MRT3847_91993C.1.pep
RLHHKLQDSHQKIRNFIEGDVPMIPTGVPHWTYITGDEPAAASTFLTPS

SEQ ID NO: 276826 - protein, 56 aa, Glycine max
  unsure (1)..(56): unsure at all Xaa locations
  Clone ID: PAT_MRT3847_91994C.1.pep
DGATSGLPLRYLETLSIGHLRQVVVMDSAQESVIFFXFYKIFIIIIIIHVKRKRET

SEQ ID NO: 276827 - protein, 89 aa, Glycine max
  Clone ID: PAT_MRT3847_91995C.1.pep
GIFGSTHASEWVDEDDDGADINMDGMDFSNFGGMGGMGGMGGMGDMAGMGGLDGMGGMGGLGGLVDLAKYYMVQNSVVQYDINNPLSII

SEQ ID NO: 276828 - protein, 378 aa, Glycine max
  unsure (1)..(378): unsure at all Xaa locations
  Clone ID: PAT_MRT3847_91996C.1.pep
AGLVSSNTLRENNFHHFEALGTKKDPFFSVNKTAISLFSENYEKLDQLKSEINSSTKLIVTGHGLGGAVVSLFTISLLNSIGSGKNRPLCITFGSPLIGDKKLQQAISRSSNWNSCFLHVVSLKDPLPTLFITNYSSSPAVLTPETSGYMPFGTFFLCSDANSTCFENPDSILELLIAMGSIHTQNQGFQSSDYGNIVEKLNDKVICKFFSTRVENMAHAGSALESSISLQLQALALTPHLQQQNIDTNTLETKIKIQEQKFILHRRIKNFDPAKKLNVVKLCMSQLEWYKKETKNQRIGYYDSYKNMNSPWDYDVIQFHKRLTNYWEKMVEEVEMKPQKEGXLFRTRWLYAGTNYRRXWLNPXAVAQYYRERGYRTM

SEQ ID NO: 276829 - protein, 129 aa, Glycine max
  Clone ID: PAT_MRT3847_91997C.1.pep
MAWNSSFKLIFLFVLVNFLSFATPKAQQVPTFLAQDCPSNGTTANSTFQINIRTLFSSLSSNATANNVFYNSTVAGANPSDTVYGLFMCRGDVPFQLCGQCVINATQKLLSDLQCSLSKQAVIWYDQCM

SEQ ID NO: 276830 - protein, 68 aa, Glycine max
  Clone ID: PAT_MRT3847_91998C.1.pep
FNFLRDLFTTKSTSNSFGLTLKIFLTPQNFILPAKLNILFLLKKRLTQKKNLSNAQKHSHFSYKVFLK

SEQ ID NO: 276831 - protein, 67 aa, Glycine max
  Clone ID: PAT_MRT3847_91999C.1.pep
PTYGNHTTILNIDGGGIKGIIPATVLEYLHNALNATDPSTSLAHYFDVISGTTTGGLMTAMYQPQTH

SEQ ID NO: 276832 - protein, 49 aa, Glycine max
  Clone ID: PAT_MRT3847_9199C.1.pep
NMEQSCFHVSCISVSLIVLNIGTKMSTGFKTKGQPQDQFLSIRGQNQND

SEQ ID NO: 276833 - protein, 40 aa, Glycine max
  Clone ID: PAT_MRT3847_919C.1.pep
YKPPYPIFITNTPKFPSTYFHEGRILVMILYSILGYCLNC

SEQ ID NO: 276834 - protein, 109 aa, Glycine max
  unsure (1)..(109): unsure at all Xaa locations
  Clone ID: PAT_MRT3847_91C.1.pep
MDTYNYSIVLSNSLTFFGGLLTKAHSTYTAXFTFNTFNPFQPNIMLQKDASIPSSGVLQLTKVHSICVPTFISLGRALYTAPIHIXYSETTKGASWSTFFIFNNFSPQQ

SEQ ID NO: 276835 - protein, 48 aa, Glycine max
  Clone ID: PAT_MRT3847_92000C.1.pep
SYPCRRVPPRHTMTRTTKTKNKGDDSIYLEEFLALRTTPLTCSFLQRS

SEQ ID NO: 276836 - protein, 53 aa, Glycine max
  unsure (1)..(53): unsure at all Xaa locations
  Clone ID: PAT_MRT3847_92001C.1.pep
KIXDSLLFKKVTKQLKSSKGNETXYPLLSMCIEKKKXILKILGLIQDXXSIPI

SEQ ID NO: 276837 - protein, 521 aa, Glycine max
  unsure (1)..(521): unsure at all Xaa locations
  Clone ID: PAT_MRT3847_92002C.1.pep
NIGGRLQTDASNGNTRVYMNGREITKIELRMLKLANVQCPRDTHFWVYEDGSYEEEGQNNIKGNIWGKASTRFICSLLSLPVPPTNPPGVKDNSTNYSTRSVPEYLEHGRVQKLLLFGMEGSGTATLFKQAKFLYGNKFSAEESQNIKLMIQSNMYKYLSILLEGREQFEEEALAERESTSLEGEGSGQERQQLMKRSXSVYSINQRFKHFSDWLLDIMATGDLEAFFPAATREYAPMVDEIWRDPAVQETYKRREELHNLPNVAKYFLDRAIEISSNEYEPSDKDILYAEGVTQSNGLAFMEFSFDDRSPMSEIYSENXQLSSHLTKYQLIRINSKGMHDGCKWLEMFEDVRAIIFCVSLSDYDQMWPTSTGQLRNKLLASKDLFESLVKHPCFKDTPFVLLLNKYDVFEDKINKVPLSICEWFGDFCPVRPHHNNHALAHQAYYYVAMRFKELYYSLTGQKLFVGQTRGRDRTSVDEAFKYIREIIKWDDEKDEDVYEINPEESFYSTEMSSSPFIRQE

SEQ ID NO: 276838 - protein, 116 aa, Glycine max
  Clone ID: PAT_MRT3847_92003C.1.pep
MKNKRKTLLLLLLMAATLFCMPIVSYAVSNVNIQDHLTNISELVKGPNRRLLSFVDCGERCRVRCSLHSRPKICTRACGTCCMRCRCVPPGTYGNREMCGKCYTHMITHGNKPKCP

SEQ ID NO: 276839 - protein, 383 aa, Glycine max
  Clone ID: PAT_MRT3847_92004C.1.pep
MEVKSRAPGKIILSGEHAVVHGSTAVASSIDLYTYVSLRFSTPSDDQDSLKLQLKETALEFSWPITRIRASFPQLSSTPTSCSVENAKAIAALVQDLNIPEANFGLASGVSAFLWLYSSIQGFKPATVLVTSELPLGSGLGSSASFCVALAAALLAYTDSVSFHVNHQGWLSFGEKDLELVNQWAFEGEKIIHGKPSGIDNTVSAYGNIISFKLGSLTHMKSSVPLKMLITNTKVGRNTKALVAGVGERMLRHPDIMAFVFSAVDSLSNELTSILKSPTPDELSVTEKEEKIEELMEMNQGMLQSMGVSHATIETVLRTTLKYKLASKLTGAGGGGCVLTLLPTLLSGTVVDKVVAELESCGFQCFIAGIGGGGVEISFGVSS

SEQ ID NO: 276840 - protein, 151 aa, Glycine max
  Clone ID: PAT_MRT3847_92005C.1.pep
MEKKRKTLLLLLLMAATLFCMPIVSIPKTCMFTCSIVLINKRIRYFCLDFFEALSLICRCRMLFLVSTFKVISPILSLVKGPNRRLLPFVDCGARCRVRCSLHSRPKICSRACGTCCFRCRCVPPGTYGNREMCGKCYTDMITHGNKPKCP

SEQ ID NO: 276841 - protein, 114 aa, Glycine max
  Clone ID: PAT_MRT3847_92006C.1.pep
CSVENAKAIAALVQDLNIPEANFGLASGVSAFLWLYSSIQGFKPATVLVTSELPLGSGLGSSASFCVALAAALLAYTDSVSFHVNHQGWLSFGEKDLELVNQWAFEGEKIIHGK

SEQ ID NO: 276842 - protein, 56 aa, Glycine max
  Clone ID: PAT_MRT3847_92007C.1.pep
IQRCETLVSLTRDASIVGMISLIQTRQSTRKPGTCPCKCDRSVRLRRRTTRADSSN

SEQ ID NO: 276843 - protein, 73 aa, Glycine max
  Clone ID: PAT_MRT3847_92008C.1.pep
ARLVRGWESPGTPHEWINTRDTRQQPAEKAGARVKKPQGSDSFLVKAQDRPTLAILHQRIWAHSRDYVIPLYK

SEQ ID NO: 276844 - protein, 163 aa, Glycine max
  Clone ID: PAT_MRT3847_92009C.1.pep
ELPFDVNAGSEGRTTNENCISQNVTFTIGSEKIICERQKISELSAPFRAMLKGHFSESLSETIDLSENNISPSGMKAISDFSLNGSLIEVLPNLLLEILVFANKYCCERLKDACDRRLASLVSSKEDAVELMEYALDEHSTVLAASCLQVPLRDLPNCLNDNR

SEQ ID NO: 276845 - protein, 156 aa, Glycine max
  Clone ID: PAT_MRT3847_9200C.1.pep
WIVFDEVHYMRDRERGVVWEESIVLSPKNSRFVFLSATVPNAKEFADWVAKVHQQPCHVVYTDYRPTPLQHYLFPSGGDGLYLVVDEKGKFREDSFQKSLNALIPATEGDKKKENGKWQKGLVLGRSGEESDIFKMVKMIIQRQYDPVILFILAER

SEQ ID NO: 276846 - protein, 113 aa, Glycine max
  unsure (1)..(113): unsure at all Xaa locations
  Clone ID: PAT_MRT3847_92010C.1.pep
MIASVNICVDNKLTETTIDTCRDVDIXAVYYTITTXLTKFIPHYMRRYLNTMLIYILTAEITAEIKYKQNQSNIYIYXLMIRRLIQTXTKHDITVDVTEEEMMDVSINGGIPA

SEQ ID NO: 276847 - protein, 48 aa, Glycine max
  Clone ID: PAT_MRT3847_92011C.1.pep
SQHLFYRQRALSQNIGSRDKQRPLFILMLVDRVADHYHSNKALGVTAH

SEQ ID NO: 276848 - protein, 58 aa, Glycine max
  Clone ID: PAT_MRT3847_92012C.1.pep
SALPLPPCNVATQLATTSVTHIHTRELVAQPSQGSSLLTAYAILEASYEGLLVAGSSY

SEQ ID NO: 276849 - protein, 157 aa, Glycine max
  Clone ID: PAT_MRT3847_92013C.1.pep
MVKECQHMLLGIALTQCLLSLQFEDCTFDWLYWSQAREPYSPDRVDYIKSLDAEKDTELLKYYGWDVPVECARTLRISTILLKKGVDRGLTPYEIGSIMSRENLNKESVIDEIICEAQESLLPGMEEYVFLESVSQIMDSRLISFQNRLSGIPSYII

SEQ ID NO: 276850 - protein, 68 aa, Glycine max
  unsure (1)..(68): unsure at all Xaa locations
  Clone ID: PAT_MRT3847_92014C.1.pep
RLQEAARRGILKGGLLPGKGTLTWLNGASSEGNWLIGLLLGFGVFTWNVGGCFVGTXPFGLKNGKGTF

SEQ ID NO: 276851 - protein, 59 aa, Glycine max
  unsure (1)..(59): unsure at all Xaa locations
  Clone ID: PAT_MRT3847_92015C.1.pep
VLGSGNWEMGLTNHKDMFFFLKKGDTDIFVNSMVSFNNVHLLLLVITXRFGYNYFILLI

SEQ ID NO: 276852 - protein, 63 aa, Glycine max
  Clone ID: PAT_MRT3847_92016C.1.pep
RRMEADLWRKVVGKKGRVKLGKGRQGHSQVQNLKSKNLPLKHKIPYYDAIYFYVKGLNARAPL

SEQ ID NO: 276853 - protein, 96 aa, Glycine max
  Clone ID: PAT_MRT3847_92017C.1.pep
HVPDCRGGTSIGRLSYHTHAITVSLVLTSASWQDKEITNGFSIETTSLDRYKDLSDGPTDCANAWDLLDSAYSMNLANHDADGDDLDLVVTALNGH

SEQ ID NO: 276854 - protein, 124 aa, Glycine max
  unsure (1)..(124): unsure at all Xaa locations
  Clone ID: PAT_MRT3847_92018C.1.pep
GGVDQPFRQPFRTLNFPFFFFCLRGALGGHGTLVKAGAVLGSRKGATETINLVKEGRGPTTRTESLAGLKPGLHGFNVHASGSTTNGCLXNWXHLNPINKELGAPKDKNRYAGDLGNVNVGDNG

SEQ ID NO: 276855 - protein, 171 aa, Glycine max
  Clone ID: PAT_MRT3847_92019C.1.pep
LGNISMKRFKRTIGMGDISKEQKSSNVSSGCSAPVVTQASVEVNKIDSCTDDAVDTGFVNNLVVDEGSGIDQGWSSDLVERSDEFLGSTTGSCLKNDYLRVLYDQPCCNLLDDLKLLDSLIWKKGRNQNHFVLSSNCKTNQSQKVKKVLKGKKRKRNVVRIVDASSSLLHK

SEQ ID NO: 276856 - protein, 80 aa, Glycine max
  Clone ID: PAT_MRT3847_9201C.1.pep
QPYLVVFRVALAFNLKQDKRRARPKRKGEGLLPKPVRVVNIHTLKREAIMLNSDTAINVRHNRAGNIITAAELPDMLRTI

SEQ ID NO: 276857 - protein, 75 aa, Glycine max
  Clone ID: PAT_MRT3847_92020C.1.pep
TVSCYGEGFVVSPGGVGVSPASRHDSACGIDDHVYGLGSSPMKEGGYRNKLSKQVPCHGNVFLKVRSPLIDSSYD

SEQ ID NO: 276858 - protein, 52 aa, Glycine max
  Clone ID: PAT_MRT3847_92021C.1.pep
ASPCCIGVVIQNLILLHYDANPHGVDHCRLTPPGNHNVPEEDHQGFRTKRRA

SEQ ID NO: 276859 - protein, 54 aa, Glycine max
  Clone ID: PAT_MRT3847_92022C.1.pep
LASAPTHTDASNVSLGRLRALHGSINSAPGLIKPTIGLLAHSVEDSFVLDGKNV

SEQ ID NO: 276860 - protein, 70 aa, Glycine max
  Clone ID: PAT_MRT3847_92023C.1.pep
ANDKHHNLRTLPLAESQCEPLRERLDSFSSRSSMGLLCKSVWAPNNHMAHYLITHKGSLHPCRSCALPLP

SEQ ID NO: 276861 - protein, 82 aa, Glycine max
  Clone ID: PAT_MRT3847_92024C.1.pep
SSDLEAKRGLSKKRPHENVSGVPNNNAQTNMELDIVDEDYQIFLNSCRDDYIPSELIEKQNLEAKRGLSKKRPHENVSGPQQ

SEQ ID NO: 276862 - protein, 76 aa, Glycine max
  unsure (1)..(76): unsure at all Xaa locations
  Clone ID: PAT_MRT3847_92025C.1.pep
SEYGGGQSVAGXDIAYGITEPSSLADMAANPSHALVYLVVMLSARALFTNTWIELCGSSARDFAKQLKEHHIGMPL

SEQ ID NO: 276863 - protein, 108 aa, Glycine max
  unsure (1)..(108): unsure at all Xaa locations
  Clone ID: PAT_MRT3847_92026C.1.pep
TPIQWGLAHIQLVLLESARERDSFALLSCCQLPFNAPIFHNRLRAPCSSRFTFSSSLVLLLPKNPLSVLPHSNSQNPNFFLVTKPFLLQSSRPFLCHSRFHSHCFXLR

SEQ ID NO: 276864 - protein, 48 aa, Glycine max
  Clone ID: PAT_MRT3847_92027C.1.pep
YYISLCLANTSEAKCKAKRKFTDGSWLLLLHFYIQLRPLIFFRFNLIF

SEQ ID NO: 276865 - protein, 103 aa, Glycine max
  unsure (1)..(103): unsure at all Xaa locations
  Clone ID: PAT_MRT3847_92028C.1.pep
XIDRFNRRCNDHXSIVRSSSIDHHLKIVIDSSTSIIISSLASTTYIIDIIIISRSCSSSSXIVVDDIIIDTHHQYDHLIIQGSRRVRDRXDIAISHHSHHIII

SEQ ID NO: 276866 - protein, 601 aa, Glycine max
  unsure (1)..(601): unsure at all Xaa locations
  Clone ID: PAT_MRT3847_92029C.1.pep
EVGIGYGDEGRGESDECFLAFARIFSGVLHAGQRIFVLSALYDPVKGESMQKHIQEAELKSLYLMMGQGLKVVTSARAGNIVAIAGLGQHILKSATLSSTKNCWPFSSMAFQVAPTLRVAIEPSDPADVGALLKGLRLLNRADPFVEVTVSGRGEHVLAAAGEVHLERCIKDLKERFAKVSLXEVSPPLVSYKETIEGDVLNVMENFDSSXHGDHADYVEKTTPNGRCVVRVQVMKLLPSLTKVLNESSDLLGDIIGVKSRQRPSILENDNPVEVLKKRILDAVGGDILSRNENDKDHAEKCKLKWLKILRRIWALGPRQIGPNLLFTPDIKAQSTDSSVLIRGSPGISERFGFVADSSINDSVTETSSNANSALYMDAEHLESSVISGFQLATSAGPLCDEPMWGLAFVVEARLSPFPGQHDESETHQQSEQYGIFAGQVIATVKDACRAAVVQNKPRLVEAMYFCELNTPTEYLGPMYAVLSRRRARVLKEEMQEGSPFFTVHAYLPVSESFGFADELRRWTSGAASALLVLSHWEALPEDPFFVPKTEEEIEEFGDGSSVLPNTARKLINAVRRCKGLPVEEKVVQHGTKQRTLARKV

SEQ ID NO: 276867 - protein, 64 aa, Glycine max
  Clone ID: PAT_MRT3847_9202C.1.pep
GNQGFAHGSGITRAKTIKRRMPLRLKKKKVVRPRLVMVMVNALQSANTRNCLFFRRIMWLMGVF

SEQ ID NO: 276868 - protein, 53 aa, Glycine max
  Clone ID: PAT_MRT3847_92030C.1.pep
HELSRIKKKKKHKRNYLNYCNADDNDNDSHSLLQILNFSNQDKKNNPFRHVIT

SEQ ID NO: 276869 - protein, 1195 aa, Glycine max
  unsure (1)..(1195): unsure at all Xaa locations
  Clone ID: PAT_MRT3847_92031C.1.pep
MFEVVDELLPVPILCTMRPTILIANSVKGEEEIPDGTVAVLTPDMPDVLSHVSVRARNSKVCFATCFDPNILANLQEYKGKLLRLKPTSADVVYSEVKEGEFIDDKSTQLKDVGSVSPISLARKKFSGRYAVSSEEFTGEMVGAKSRNISYLKGKVASWIGIPTSVAIPFGVFEHVLSDKPNQAVAERVNNLKKKLTEGDFSVLKEIRETVLQLNAPSQLVEELKTKMKSSGMPWPGDEGEQRWEQAWIAIKKVWGSKWNERAYFSTRKVKLDHEYLSMAVLVQEVINADYAFVIHTTNPASGDSSEIYAEVVKGLGETLVGAYPGRALSFICKKRDLNSPQVLGYPSKPVGLFIRQSIIFRSDSNGEDLEGYAGAGLYDSVPMDEAEKVVLDYSSDKLILDGSFRQSILSSIARAGNEIEELYGTPQDIEGVIKDGKVYVVQTRPQMETCIYRKTLNANGITKERLLSYDPNVHLAAYLSSGVTPGLPNMALNYYYMIYAVLTGADLESAIXNCMGYKSEGXGFMVGVQINPVPGLPNGFPELLEFVAEHVEEKNVEPLLEGLLEARQELQPSLSKSQSRLKDLIFLDVALDSTVRTAVERSYEELNNAGPEKIMYFISLVLENLALSSDDNEDLIYCLKGWDVALSMCKSKDTHWALYAKSVLDRTRLALTNKAHLYQEILQPSAEYLGSLLGVDRWAVEIFTEEIIRAGSAASLSTLLNRLDPVLRKTAHLGSWQVISPVETVGYVEVIDELLAVQNKSYERPTILIAKSVRGEEEIPDGTVAVLTPDMPDVLSHVSVRARNSKVCFATCFDPNILANLQENKGKLLRLKPTSADVVYSEVKEGELIDDKSTQLKDVGSVSPISLARKKFSGRYAVSSEEFTGEMVGAKSRNISYLKGKVASWIGIPTSVAIPFGVFEHVLSDKPNQAVAERVNNLKKKLIEGDFSVLKEIRETVLQLNAPSHLVEELKTKMKSSGMPWPGDEGEQRWEQAWIAIKKVWGSKWNERAYFSTRKVKLDHEYLSMAVLVQEVINADYAFVIHTTNPASGDSSEIYAEVVKGLGETLVGAYPGRALSFICKKRDLNSPQVLGYPSKPVGLFIRRSIIFRSDSNGEDLEGYAGAGLYDSVPMDEAEKVVLDYSSDKLILDGSFRQSILSSIARAGNEIEELYGTPQDIEGVIKDGKVYVVQTRPQM

SEQ ID NO: 276870 - protein, 597 aa, Glycine max
  Clone ID: PAT_MRT3847_92032C.1.pep
MITLLDLYHVLTAVVPLYVAMILAYGSVKWWKIFTPDQCSGINRFVALFAVPLLSFHFISTNNPYAMNYKFIAADTLQKAIVLAVLLVWSRTSSRGSLEWSITLFSLSTLPNTLVMGIPLLKGMYGDDSGTLMVQIVVLQCIIWYTLMLFLFEYRGARLLIVEQFPDTAGSIISFKVDSDIISLDGKEPLQTEAEVGDDGKLHVTVRKSASSRSEIFSRRSHGPNSVSLTPRPSNLTNAEIYSLQSSRNPTPRGSSFNHTDFYSMVNGKNNNNNNNNVSMSPRQSNFGGFDEESGGGVRVNGGAGVRGYPGPANAGIFSPVAAKKKGGESGGGGKDLHMFVWSSSASPVSEGGIHVFRGGGGDYGSDQLPVGGVAHQKDYDEFGHDEFSFGNRTVANGVDKEGPVLSKLGSSSTAELRPKAQGEAKPTSMPPTSVMTRLILIMVWRKLIRNPNTYSSLFGLTWSLISFKWNVVMPAIVAKSISILSDAGLGMAMFSLGLFMALQPKIIACGNSVASFAMAVRFLTGPAVMAVASIVVGLRGVLLHIAIVQAALPQGIVPFVFAKEYNVHPDILSTGVIFGMLIALPITLVYYILLGL

SEQ ID NO: 276871 - protein, 244 aa, Glycine max
  Clone ID: PAT_MRT3847_92033C.1.pep
SGIPGSTHASDGSVQLPVCGVAHQKDYDEFGHDEFSFGNRTIANGVDKEGPVLSKLGSSSTAELHPKAQGESKPTSMPPTSVMTRLILIMVWRKLIRNPNTYSSLFGLTWSLISFKWNVVMPAIVAKSISILSDAGLGMAMFSLGLFMALQPKIIACGNSVASFAMAVRFLTGPAVMAVASIVVGLRGVLLHIAIVQAALPQGIVPFVFAKEYNVHPDILSTGVIFGMLIALPITLVYYILLGL

SEQ ID NO: 276872 - protein, 136 aa, Glycine max
  Clone ID: PAT_MRT3847_92034C.1.pep
IFRPILCIFFPTVHASSFVICSPPSLLPPLLSFFLPPLCDLPLFPPSPSMTVHSHLSDLQVSPSLFCSLPLLLVCFSSTTFFLWVSVLKFFLIFFQALQVSCRRIHSPPQRSLFPFIARSTQDQILNYKVALNYFL

SEQ ID NO: 276873 - protein, 65 aa, Glycine max
  Clone ID: PAT_MRT3847_92035C.1.pep
INGDIFKFSLLKNRHELILMDDHSQDCIHTGSWGPFLSIGKSTTFFYKGKNIQIHWGNTKGGGQI

SEQ ID NO: 276874 - protein, 44 aa, Glycine max
  Clone ID: PAT_MRT3847_92036C.1.pep
SRCLVYVCVTRAFGHKYYGVPAGVEWELHCFSYMESSIPEPTKP

SEQ ID NO: 276875 - protein, 215 aa, Glycine max
  Clone ID: PAT_MRT3847_92037C.1.pep
MITLWDLYHVLTAVVPLYVAMILAYGSVKWWKIFTPDQCSGINRFVALFAVPLLSFHFISTNNPYAMNYKFIAADSLQKAIVLAVLLVWSRTSSRGSLEWSITLFSLSTLPNTLVMGIPLLKGMYGDASGTLMVQIVVLQCIIWYTLMLFLFEYRGARLLIVEQFPDTAASIISFKVDSDIISLDGKEPLQTEAEVGDDGKLYVTVRKSASSRSE

SEQ ID NO: 276876 - protein, 62 aa, Glycine max
  Clone ID: PAT_MRT3847_92038C.1.pep
IFICWVIYNTLLNFGGQNKIHNFLKSPLNFYNTFQPTKFTYNTTCVQLPVHINWKCPKAKSP

SEQ ID NO: 276877 - protein, 109 aa, Glycine max
  unsure (1)..(109): unsure at all Xaa locations
  Clone ID: PAT_MRT3847_92039C.1.pep
AHAYGDFIKNMITGASQADCCDLGIDCTAGGYEDGDSKDGHTREHALLAFTLRVKQVIXCCNKMDATTPKYSKYTYEEIVNEVSSYWKNDGYNPYKIPWDAISGVKVDN

SEQ ID NO: 276878 - protein, 86 aa, Glycine max
  unsure (1)..(86): unsure at all Xaa locations
  Clone ID: PAT_MRT3847_9203C.1.pep
SFLSLHHHHHHHRGLNNIPIINISIARPEXSTHPDSFYAYLAXFIYTFIFLFAXSGSSIFYYILTYYCSTNPSCLIYSSIAHSLAL

SEQ ID NO: 276879 - protein, 69 aa, Glycine max
  Clone ID: PAT_MRT3847_92040C.1.pep
VRSAVRFICRPFHSVTCLYGYVCNNRGQPNLSHRADMRLIRTDDTEYRNEAVISSIEPFVSPFRSSTDV

SEQ ID NO: 276880 - protein, 63 aa, Glycine max
  Clone ID: PAT_MRT3847_92041C.1.pep
ENRPFSASSFNGDEISLPMGHQVRSDPLRTAQSKLTFYKLTRCQSEHVVHPSKRVWNDDGYWV

SEQ ID NO: 276881 - protein, 94 aa, Glycine max
  unsure (1)..(94): unsure at all Xaa locations
  Clone ID: PAT_MRT3847_92042C.1.pep
LKPLSAVDVSNWDQCTPRYRLVAQDXPIPPARQRTXSLQTCVNDHWVSGTSGSEEYRFEHMRENQNEESLLRVKDDKLELDVSLEGEKVVTQKG

SEQ ID NO: 276882 - protein, 70 aa, Glycine max
  Clone ID: PAT_MRT3847_92043C.1.pep
VATAASAVLASNAMAIEVLLGGDDGSLAIVPNNFSVASGEKIVFKNNAGFPHNVVFDEDEIVSGVDAGKI

SEQ ID NO: 276883 - protein, 148 aa, Glycine max
  unsure (1)..(148): unsure at all Xaa locations
  Clone ID: PAT_MRT3847_92044C.1.pep
LFRGCDSASFDGLVTKQAVSKMAELINSVCGGDEKLLLEGPPLLLACCSRMGGXKNDVWGGECPIPFGSPLTGFCNTILNDMLIGYSYEKLLRQANAPSVLIQXSFKKSGCLCEYGDDNXASVHEYVPAYYIGSQLQSWVAGHNITMT

SEQ ID NO: 276884 - protein, 64 aa, Glycine max
  Clone ID: PAT_MRT3847_92045C.1.pep
MRPLFRFAQLARRHYKASPPPPPPTPPKPPKKPQKFSFHGATWADPYSWMSQLNDKVAMRHMDV

SEQ ID NO: 276885 - protein, 74 aa, Glycine max
  Clone ID: PAT_MRT3847_92046C.1.pep
FAGTVYWASVLPDHPTVWHCIHNNIIYFRTLSPPRLVGFAGSRSVPGCHPHWRSNQNVLFIRNLTVINVTVEYG

SEQ ID NO: 276886 - protein, 42 aa, Glycine max
  Clone ID: PAT_MRT3847_92047C.1.pep
FYYDQRVWVSKYSKAKFVKKGDQGFTRMLNSHTLPPSIILKH

SEQ ID NO: 276887 - protein, 67 aa, Glycine max
  Clone ID: PAT_MRT3847_92048C.1.pep
ILFKKSCSLLGNGFPMFAQIEVVPNLKMDGLGGKLHEMAKRDTKYQEWFKVHTWGYKPKAMILSLIM

SEQ ID NO: 276888 - protein, 73 aa, Glycine max
  Clone ID: PAT_MRT3847_92049C.1.pep
KLIFLLLGFLRTLMGFNLATGLDFYHKPSVFNKTFLGKLNPKAFLLPQTARRLSTLFTLNPELTVLLISPIKK

SEQ ID NO: 276889 - protein, 232 aa, Glycine max
  Clone ID: PAT_MRT3847_9204C.1.pep
ERLAQIERAERGIAEGGGEKGKLEAELQRVRDSEKDALTRAVKLEEKVQQREKDLEALLDKDKTHRRNSAQILEQLLETEREAHAQANNRAEALSLQLQSAQAKIDSLHQELTKFRLNETALDSKLNTASHGKRMRVDDNIGDDMDVSPRIVKGTKRTRSTYTQPEDGGSIFEGAEENLSQRTSEDDYRKFTVQRLKQELTKHNYGDQLLRLKNPNKKDIIALYEKCVLHKS

SEQ ID NO: 276890 - protein, 64 aa, Glycine max
  Clone ID: PAT_MRT3847_92050C.1.pep
LGIFPPGPPLGVFKGAISRFLFSQSFLTGAWGLAPALVSLWGGAMRTFYMGIQINLTLFLWGPG

SEQ ID NO: 276891 - protein, 53 aa, Glycine max
  Clone ID: PAT_MRT3847_92051C.1.pep
SRYDTHLKLTKSAKTIPPCKNLQHQFLFPVISRQNRTRLVGTQPHKFMRVTHA

SEQ ID NO: 276892 - protein, 58 aa, Glycine max
  Clone ID: PAT_MRT3847_92052C.1.pep
LSLFNFLKDINIPLMLKGDSLLLVLYILMRVSRRNVLAINDKPKPTLGFWLFCFWIQS

SEQ ID NO: 276893 - protein, 215 aa, Glycine max
  unsure (1)..(215): unsure at all Xaa locations
  Clone ID: PAT_MRT3847_92053C.1.pep
PRPLLLGLGVFGSVLVLALLFKHLASQQPNTDEFFVSEFLKKMGLASSQGYNFSASVCSWQGVSCDANGEHIVDLVFSGMDLSGTMPDNTIGKLSKLQSLDLSHNKITGLPSDFWSLSSLKSLNLSSNQISGSLTNNIGNFGLLESIDLSSNNFSEEIPEAVSSLLSLRVLKLDHNRFAHSIPSGILKCQSLVSMMFLQSAEWTLPEGXGAAFPN

SEQ ID NO: 276894 - protein, 77 aa, Glycine max
  Clone ID: PAT_MRT3847_92054C.1.pep
SCCGGYCGCRFSCSCGLCCRGCSMYPYLSSTESSTTDTLFMGVAPVTAPFHGAALVAPAVNDGCSCGPCCSCTPCAC

SEQ ID NO: 276895 - protein, 151 aa, Glycine max
  unsure (1)..(151): unsure at all Xaa locations
  Clone ID: PAT_MRT3847_92055C.1.pep
MGLGVFGSVLVLALLFKHLASQQPNTDEFFVSEFLKKMMGLASSQGYNFSASVCSWKGVSCDANREHVVDLVFSGMDLSGTIPDNTIGKLGKLQSLDLSHNKITDLPSDFWSLSTVKSLNLSSNXISGSLTNNIGNFGVLESIDLSSNNFS

SEQ ID NO: 276896 - protein, 61 aa, Glycine max
  Clone ID: PAT_MRT3847_92056C.1.pep
SLGSLRIMVAMIPTLVQGLHVNVCKLLVEIKIQRNILLVYTFFPLPFSLTKGVKCNILWPV

SEQ ID NO: 276897 - protein, 87 aa, Glycine max
  Clone ID: PAT_MRT3847_92057C.1.pep
SSASACWPSEGSESRESVYTAIQCAELPLVITFQQCSCRLAISSKNITTTMVLVQGDCTFVFFHHPHFFLNGSSSQQSTNCPKKNKV

SEQ ID NO: 276898 - protein, 52 aa, Glycine max
  Clone ID: PAT_MRT3847_92058C.1.pep
TSKPDEYGNRIHAASITYLSTSTPTHNYNDNINNQHNTTNTYYLYTNTQHST

SEQ ID NO: 276899 - protein, 48 aa, Glycine max
  Clone ID: PAT_MRT3847_92059C.1.pep
WSTSYIQIGTHHIPVDVILNFRQNTHVTNQPQQCLLRRLRFQDPPGLS

SEQ ID NO: 276900 - protein, 79 aa, Glycine max
  Clone ID: PAT_MRT3847_9205C.1.pep
RFSLVSFGGALTKFNSNSSHQNPRHVLETLIRYPPTQKTKDRCGQFLAWRNAARTAHATPAGPTYSGIKRRSVSIAYCG

SEQ ID NO: 276901 - protein, 214 aa, Glycine max
  Clone ID: PAT_MRT3847_92060C.1.pep
FSLYTKFDNTSRSGPKAFVSEYAVKSDAANGNLLAAVAEAAFLIGLEKNSDIVEMVSYAPLFLNINDKRWIPDAIVFDSYQVYGTPSYWVQKLFIESSGATFIDSTLSTTSSNKLAASVIIWQDSSDKKNYLRIKAVNFGAAAESLDIDLSGLDSNVQQYGSTITVLTSTNVMDENSFLEPKKVVPQTSPLEIDDKHLIVLLPSYSVISLDFLI

SEQ ID NO: 276902 - protein, 74 aa, Glycine max
  Clone ID: PAT_MRT3847_92061C.1.pep
GTVRINQPYNIKLNSPKTIFKKYNFSHNIKQVWLHPIVQSSLVLSHYFCESVFTYTFLFQFNSNLLFGSEYSDS

SEQ ID NO: 276903 - protein, 106 aa, Glycine max
  Clone ID: PAT_MRT3847_92062C.1.pep
LCGILRFWGVCCRTKLKQTEVDCEFLKKCCETLKDENRRLKKKLQELKALKLAQPLYMPMPAATLTMCPSCERLGGVSDNGSNKSPFSMAPKPHFYNPFANPSAAC

SEQ ID NO: 276904 - protein, 283 aa, Glycine max
  Clone ID: PAT_MRT3847_92063C.1.pep
MGLDQDANSSGLHLVLGLSLTASVKETTQSTKPDDDHHLCVIKPTPTKPYPSNEPSLTLGLSGKGYHVPNHVAINKVYCEDPLEFSRQTSPHSVVSSFSTGRVIKRERDLSCEDMEVEAEERVSSRVSDEDEDGTNARKKLRLTKEQSALLEESFKQHSTLNPKQKQALARRLNLRPRQVEVWFQNRRARTKLKQTEVDCEFLKKCCETLKDENRRLKKELQELKALKLAQPLYMPMPAATLTMCPSCDRLGGVNDNGSNKSPFSMAPKPHFYNPFANPSAAC

SEQ ID NO: 276905 - protein, 148 aa, Glycine max
  Clone ID: PAT_MRT3847_92064C.1.pep
AFLRSLPMRQLQPRAPAAVAPLPEKTLFDRELTAELDTLRSQGELGLAQLLDAAITTQKVASDSLANVCYKDYADRGAVDKYLEDNVEMLDECNYFMDKIDHINKYVDSLRVVVHLVDKGGSAKPITRALELLESCQGMEKRCKAMEK

SEQ ID NO: 276906 - protein, 47 aa, Glycine max
  Clone ID: PAT_MRT3847_92065C.1.pep
QPSKKIWWLNSPKKGRLILLRPVKKTPKGFPLKKNLKGGGCGKGPPG

SEQ ID NO: 276907 - protein, 64 aa, Glycine max
  unsure (1)..(64): unsure at all Xaa locations
  Clone ID: PAT_MRT3847_92066C.1.pep
MDGQEQDVSLGANMCPVRHRLWTASQSQDDGEDXHEPALAPLVDPTEFTCXSVDIAGIAAFVAT

SEQ ID NO: 276908 - protein, 89 aa, Glycine max
  Clone ID: PAT_MRT3847_92067C.1.pep
RTRGPSGEGRAFGGGSALASRSPPSLKVSAYLPFCEMGLDLEDDDVRHSELLMDSFRGSEKGGNFGMRCEYVYVCSSENEGRKGVFGGK

SEQ ID NO: 276909 - protein, 57 aa, Glycine max
  Clone ID: PAT_MRT3847_92068C.1.pep
TIPYCTHSMPPQEDVERNSRYTQQHYTYLHSHESIYGLSASHRTHTSTRIRNRTRYK

SEQ ID NO: 276910 - protein, 70 aa, Glycine max
  unsure (1)..(70): unsure at all Xaa locations
  Clone ID: PAT_MRT3847_92069C.1.pep
WGEDGYITLXRNLANSISGKCGIAMEPSYPLKNGPNPPNPGPSPPTPVKPPNVCDNYYSXADCATSCCIY

SEQ ID NO: 276911 - protein, 104 aa, Glycine max
  Clone ID: PAT_MRT3847_9206C.1.pep
ASHGKRMRVDDNIGDDMDVSPRIVKGPKRPRSTYSHPEDGGSIFEGAEENFSQRTSEEDYRKFPVQRLKQELTKLNYGDQLLRLKNPTKKEIIALYEKCVLQKS

SEQ ID NO: 276912 - protein, 110 aa, Glycine max
  unsure (1)..(110): unsure at all Xaa locations
  Clone ID: PAT_MRT3847_92070C.1.pep
GNSGKAKVNVGIPLTLMAGKKSIDLLSLTVGLXNYGAFFDTWGAGILGPVILEGLKNGSTVXLSSQQWTXQGGLKYENLGPFNGSSGQWNSQFALPTNQSLVWXKMTFDD

SEQ ID NO: 276913 - protein, 92 aa, Glycine max
  Clone ID: PAT_MRT3847_92071C.1.pep
LLDCPLDLSALMAFSPVPTALDCLPVEESYNTEANAFFDSRFGSGKRQKIENLLDAKSLLFAEPWYKTVNNLHLWNASFIDVVLISSPMGIM

SEQ ID NO: 276914 - protein, 134 aa, Glycine max
  unsure (1)..(134): unsure at all Xaa locations
  Clone ID: PAT_MRT3847_92072C.1.pep
TDSSKSGFSLNCNKRTKFLVTKVDEKSRSKEKGEYSQSSKSSIGEYSSSTSISEESSLSGSSRSGHRPHMSKHLRWEAVRAVQQQHGSLNLKHFKLLRRXGSGDIGTVYLAELIGPAAFCTQVMTVILAGGEMS

SEQ ID NO: 276915 - protein, 59 aa, Glycine max
  Clone ID: PAT_MRT3847_92073C.1.pep
LDLIMKLCLKFIAVCMKSKSDQFNGIGFYFILLWKTVGEMVQLCHILIFNQKSKPAFIG

SEQ ID NO: 276916 - protein, 140 aa, Glycine max
  unsure (1)..(140): unsure at all Xaa locations
  Clone ID: PAT_MRT3847_92074C.1.pep
MAEGVKLEDRWGYYVATSSQACVSAINSYYHQVLIYGRERSVILEAVAHDKHCVLANILAAHFLHSSGSSRALTCLHAAKSNLEHATLYEKLVFDAISYMLSEDRDDDVAVELHSKLXLKEFPRDLVSLKRAXVICFYMG

SEQ ID NO: 276917 - protein, 128 aa, Glycine max
  Clone ID: PAT_MRT3847_92075C.1.pep
FTMEQQPRVLAIRRNLEKLKLELHNINRGIDSHVQGKRVNGTWGASRYLIGEEDDTESDGDEDDDAQSLLRCPSCDFEIDFSSLRIHLEEMHCYDPKNMLCPVCDETLGEDAIRVAQNSSAQKRAWKS

SEQ ID NO: 276918 - protein, 289 aa, Glycine max
  Clone ID: PAT_MRT3847_92076C.1.pep
MAQIEKFLVALFLFAMAHSIILVDATFSKSMYITWGSRHASMQGEDLQLVLDQTSGSAAQTKKAFLFGSIESRIKLVPGNSAGTVTAYYLSSTGSQHDEIDFEFLGNISGQPYIVHTNIYTQGNGSREQQFYLWFDPTADFHNYTIHWNPIEVVWYIDSIPIRAYRNYENEGIAYPNKQGMRVYTSLWNADDWATRGGLVKTNWSGAPFIARFNHFRARACKWNGAVSINQCALNFPANWWTSPTYKQLSYAKLGQMNWVRNNYMIYDYCRDTKRFNGRMPPECFKSQF

SEQ ID NO: 276919 - protein, 79 aa, Glycine max
  Clone ID: PAT_MRT3847_92077C.1.pep
LSHERFICLMEHGLSHKGQTRVLMNAKSNFGLALIVIVGSIVCLDRLPKLWKKLMLQASVEFIIHNVLHGLIEVPPPWA

SEQ ID NO: 276920 - protein, 66 aa, Glycine max
  Clone ID: PAT_MRT3847_92078C.1.pep
CYLSGQNTWLVFFFIFGCGRGVLGDCCSLRRKEPNAETDGTRGGTASVGSVLGQGPQYEQYSDIVK

SEQ ID NO: 276921 - protein, 58 aa, Glycine max
  Clone ID: PAT_MRT3847_92079C.1.pep
CKWKLHCTEFKQILDYILWKDFIFFFSTKNCQCFMCMNVNVMITFIILHILFSVVPSS

SEQ ID NO: 276922 - protein, 60 aa, Glycine max
  Clone ID: PAT_MRT3847_9207C.1.pep
FCPKLSLRCRIFVYVCSLESKYAEGIKKRGPNSASIAKFMYKMQFCVGPLSKIYANFTIL

SEQ ID NO: 276923 - protein, 81 aa, Glycine max
  unsure (1)..(81): unsure at all Xaa locations
  Clone ID: PAT_MRT3847_92080C.1.pep
NFSICNGRVFKSDHTLRFWEGLESGEDAIPTSTRCVIXCXVECTXIFSCPVCVPFQYLIAPLKSKLYYNKRTRGLTALQAL

SEQ ID NO: 276924 - protein, 56 aa, Glycine max
  Clone ID: PAT_MRT3847_92081C.1.pep
DECVYSYVCIGAYYASILFNDFAFMNIWAQIDDLQSCYYQLYDIPLLLRSIECYTQ

SEQ ID NO: 276925 - protein, 159 aa, Glycine max
  Clone ID: PAT_MRT3847_92082C.1.pep
GKRPEILTILQNCAVLSVACCVFYSHCGNRAMLRERPLDRRNSNWFSFWKKEERNTWLAKFLRMNELKDQVCSSWFAPVGSASDYPLLSKWVIYGEIACNGSCPGSSDEISPIYSLWATFIGLYIANYVVERSTGWALTHPLSVKEYEKLKKKQMKPDF

SEQ ID NO: 276926 - protein, 103 aa, Glycine max
  unsure (1)..(103): unsure at all Xaa locations
  Clone ID: PAT_MRT3847_92083C.1.pep
HLDPSFGRKTALKLIKKHGSLETKIKAAAIRTVGSPXAQDALKNQADHLRRNXEVPALKREENAQLNEEGXIKRDNRNDKRALSAFVREESKELTNGRPSFNG

SEQ ID NO: 276927 - protein, 125 aa, Glycine max
  Clone ID: PAT_MRT3847_92084C.1.pep
TRPLGQHRTAFSIRTTLIFLEFFMDSSFDTLVGPSSASGRMELRISVAGRWSRTGKSTLIAAMVSVAFPQARSSRAFPHSLAQKSLARVRFSYPERLTLPAWQIGGHAHDDRSLGDTQAETYAGL

SEQ ID NO: 276928 - protein, 79 aa, Glycine max
  Clone ID: PAT_MRT3847_92085C.1.pep
GAGVRALARISVKLRVICTLASVLCPAAGSVPFAVQDAPLLGRVTLAVPVCYTFGSRNRGCTSRLLSWVTTGLSQASSM

SEQ ID NO: 276929 - protein, 64 aa, Glycine max
  Clone ID: PAT_MRT3847_92086C.1.pep
LKKFHVGSDESKSSFRSKSHIIIFIGIKFKLWYIYKDKKTYFSFKKISNYNSIIFKQEVTCLIL

SEQ ID NO: 276930 - protein, 32 aa, Glycine max
  Clone ID: PAT_MRT3847_92087C.1.pep
SQQDYQTPWLMSVSGQRHPSQYPGCMLVSYFT

SEQ ID NO: 276931 - protein, 81 aa, Glycine max
  unsure (1)..(81): unsure at all Xaa locations
  Clone ID: PAT_MRT3847_92088C.1.pep
ETKDTAVDTHKVVGHSVHVHTSGNRYETCLVTLARFQEPHYEPGINASSSIXQSERGPTTSQVLTVVSRLSVGGILLLLEG

SEQ ID NO: 276932 - protein, 72 aa, Glycine max
  Clone ID: PAT_MRT3847_92089C.1.pep
YWEPLGGVIQSRGLLVVSIPSSIFFGLFPKKVIFIVWTPFFLLFYLKIPVPLGSFCSSNLEKKFVKKIFLGH

SEQ ID NO: 276933 - protein, 68 aa, Glycine max
  Clone ID: PAT_MRT3847_9208C.1.pep
HLAHGVACATHGGHGYPPVADPPSSGAYPSQQGYPTAGYAAQQGYAAAGYPAHAGYPSDGYPAIGYPG

SEQ ID NO: 276934 - protein, 193 aa, Glycine max
  Clone ID: PAT_MRT3847_92090C.1.pep
LVGDNPIANLRSLDALLGMVTSKVGKRHALTGFEALQELFIASLLPDRKLKTLIQRPLNHVPETKDGYSLLLFWYWEECLKQRYERFVVALEEASRDMLPALKNKALKAVYVLLSRKSEQERRLLSALVNKLGDPDNKAASNADFHLSNLLSDHPNMKAVVIDEVDSFLFRAHLGPRSQYHAVNFLSQIRLTN

SEQ ID NO: 276935 - protein, 392 aa, Glycine max
  Clone ID: PAT_MRT3847_92091C.1.pep
DLFQKKKKKKKKKKKKKKKKIFNTTSDTEVVLHLIATSKHRPFLLRIVDACEHLQGAYSLVFVTEDKLVAVRDPFGFRPLVMGRRTNGAVVLASETCALDLIEATYEREVYPGEVIVVDHTGIQSLCLVAHPEPKQCIFEHIYFALPNSVVFGRSVYESRRQFGEILASESPVECDVVIAVPDSGVVAALGYAAKAGVPFQQGLIRSHYVGRTFIEPSQKIRDFGVKLKLSPVRAVLEGKRVVVVDDSIVRGTTSSKTVRLLKEAGAKEVHMRIASPPIIGSCYYGVDTPSSEELISNRMSVEEIRDFIGSDSLAFLPFDSLKRLLGSESPNFCYACFSGNYPVEPRELKVKRVGDFVDDGLNGSLESIDGGWVQANRNQIKVGTGTSTSIS

SEQ ID NO: 276936 - protein, 143 aa, Glycine max
  Clone ID: PAT_MRT3847_92092C.1.pep
GTACRLPRNSRVRPTRPIGSCYYGVDTPSSEELISNRMSVEEIRDFIGSDSLAFLPFDSLKRLLGSESPNFCYACFSGNYPVEPRELKVKRVGDFVDDGLNGSLESIDGGWVQANRNQIKLGTGTSTSTSIHNPLFLFLVFAA

SEQ ID NO: 276937 - protein, 74 aa, Glycine max
  Clone ID: PAT_MRT3847_92093C.1.pep
GFLSSRISLKVLLGLWQTIHVLLIDKSVLTLHRLGRNNRLKLFIYKYIKTLNIIHKNYRPIISLKMTHFNMLSE

SEQ ID NO: 276938 - protein, 59 aa, Glycine max
  Clone ID: PAT_MRT3847_92094C.1.pep
VKIRRLSLFLSIFLLVFVFLFNQIHLPLLVRYEFIIFCCYKYFYMNLRIFYFIYVILQN

SEQ ID NO: 276939 - protein, 99 aa, Glycine max
  unsure (1)..(99): unsure at all Xaa locations
  Clone ID: PAT_MRT3847_92095C.1.pep
LSLSIHFPTDYPFKPYNDAFMTKLFHPNINTIGSICHDILNEQWSPALTISKALLSICAXLTDTNPDDPLVPEIAHMCKTDRAQYEAIVRRRTHEDAMR

SEQ ID NO: 276940 - protein, 147 aa, Glycine max
  unsure (1)..(147): unsure at all Xaa locations
  Clone ID: PAT_MRT3847_92096C.1.pep
ASLSSLVLLLAALILSPQVLANYENPPVYKPPTEKPPAHKPPVYKSVXYKAAAENPPIYKPTVQKPPVYKPPFEKPPVYKPPVEKPPVYKPPIEKPPVYKPPVEKPPVDKPPVEKPPGHKPPAEKPPVYRPPGEKPPGYRPSVEKPP

SEQ ID NO: 276941 - protein, 75 aa, Glycine max
  unsure (1)..(75): unsure at all Xaa locations
  Clone ID: PAT_MRT3847_92097C.1.pep
TTEXGATGLXNNXISYINXXRSARXXSIKRALSLEQTRGCARQXRCWLXLGPLTPXXRLDRILITPFIKNRLLSL

SEQ ID NO: 276942 - protein, 68 aa, Glycine max
  Clone ID: PAT_MRT3847_92098C.1.pep
RILFFIFVFFTFPTPKAQNFCERSNSSALNSIRLTFTHLDIQLNHLTLFLGLVLLSISLYYIICLILL

SEQ ID NO: 276943 - protein, 38 aa, Glycine max
  Clone ID: PAT_MRT3847_92099C.1.pep
IDDWHAQSKKDDAHKKVSTPSKTPWLKVNSRVNKMQIC

SEQ ID NO: 276944 - protein, 244 aa, Glycine max
  unsure (1)..(244): unsure at all Xaa locations
  Clone ID: PAT_MRT3847_9209C.1.pep
MQKRILCVPSTAMHITLKSGKDVPTGFFLSELAVPAQILKDAGFSISYATVNGARPSLDPLSDRSLWFGFSNEEYHKAKAFIDSERTNSGFDRPTPLSALSDGDLEIFSALFIPGGHGPMVDLADNPDMARILSYFLRSNKIIXLDLSXALXAFLSLTRSGAPFALKDYRMTCYSNVEENMNLLIWYSTPQWRVASRLAEAGAIVSNSVPMSTQVIVDRNVITAQGPSGAKNLGNAVLKGLEKQ

SEQ ID NO: 276945 - protein, 85 aa, Glycine max
  Clone ID: PAT_MRT3847_920C.1.pep
KGKINFNLPKTFFCWAKFFERHKKSVSQTDLKIPPKGWGRVFIGPRKRKTSQKMFFRAKPFKNQKMVFPQGFFPATGKTDLKPFF

SEQ ID NO: 276946 - protein, 177 aa, Glycine max
  Clone ID: PAT_MRT3847_92100C.1.pep
NRPFFFFFFFFWGGGSDLNKIAWVNWEIVCLPKERGGLGIKDITSFNLALLGKWKWELFHRQDELWAKVLVSRYGDWRGLAEAPYDKNASLWWRDLKLALHQPSIQNVFRDGIAWKVGRGDKILFWEDNWLQGDAALVARYPRLYLNSCQQNHRIMDMGAQKDMGWEWNFKWRRHLF

SEQ ID NO: 276947 - protein, 87 aa, Glycine max
  Clone ID: PAT_MRT3847_92101C.1.pep
LLQTCIDEPVGTEHFFFRAAWGSLGFRKDIFSLNVFDDSHRTQFDLLFFARNLSCWRIFRESFQQPWVVVGNILTKPGSPFLKKLGF

SEQ ID NO: 276948 - protein, 128 aa, Glycine max
  unsure (1)..(128): unsure at all Xaa locations
  Clone ID: PAT_MRT3847_92102C.1.pep
SFSCDHAGDLALEFCQMTNPYIKCSTSNSIVXGNLADNAINFEAIPHMLAQIGXIQEKGGLKFPQEEFCTVRSTQVRPATALLADECSSLDSMAHDMSLSTIPIVSCICCKXRTINTMCAYGLNPGIS

SEQ ID NO: 276949 - protein, 346 aa, Glycine max
  Clone ID: PAT_MRT3847_92103C.1.pep
MIQEDQGQCSSQAINNYHQAYQEQLLLQQQMQQQQQNNDIFGGGGGLNMYPGAEVSPIMNHHHQPWSMTMPHHHHHHQVHDPFLVPPQPSPYASLFNRRGPSLHQFAYDHHGSSSDHLRIISESLVGPVVQPGSAVPFGLQTELAKMTAQEIMEAKALAASKSHSEAERRRRERINNHLAKLRSLLPSTTKTDKASLLAEVIQHVKELKRQTSLIAETSPVPTEADELTVVDEADEDGNSVIKASLCCEDRSDLFPELIKTLKALRLRTLKAEITTLGGRVKNVLFITGEETDSSSSEDHSQQQQQCCISSIQEALKAVMEKSVGDHHESASANIKRQRTNIISMS

SEQ ID NO: 276950 - protein, 216 aa, Glycine max
  Clone ID: PAT_MRT3847_92104C.1.pep
MIQEDQGQCSSQAINNYHQAYQEQLLLQQQMQQQQQQQQQNNDIFGGGLNMYPGGEVSQIMHHHHHQPWSMTMPHHHHHHHQVHDPFLVPPQTSPYASLFNRRGPSLQFAYDHGSSSDHLRIISESFVGPVVQPGSAPFGLQTELAKMTAQEIMEAKALAASKSHSEAERRRRERINNHLAKLRSLLPSTTKTDKASLLAEVIQHVKELKRQTSLI

SEQ ID NO: 276951 - protein, 67 aa, Glycine max
  Clone ID: PAT_MRT3847_92105C.1.pep
AIHSEVNTNKGGKWWALYLARGVQPKTYKCWERVFDPSIQMHDNYFRHHSICFGVPPIALGGNAGNA

SEQ ID NO: 276952 - protein, 52 aa, Glycine max
  Clone ID: PAT_MRT3847_92106C.1.pep
VKSVCFSFFCLSVLHIRKKYVFGILLDVANKFQQLTVLLLSLSYESGIGKNV

SEQ ID NO: 276953 - protein, 130 aa, Glycine max
  unsure (1)..(130): unsure at all Xaa locations
  Clone ID: PAT_MRT3847_92107C.1.pep
HIRGYLYRTDSITNYQHSXFYSINLEWHPNDTSMFNINRTVLSIIPYYKLLGIGVEKXTPSSMHNWLTRTMHGALSQSRESIYRSASLVYTIILPDXRTLDEHVVAASTVDKADLHTXDDSILKDRLDPN

SEQ ID NO: 276954 - protein, 52 aa, Glycine max
  Clone ID: PAT_MRT3847_92108C.1.pep
WLPTVLISLAVQCYSPLALTHCLAEDHGLVMNFYKELCPQAADIIKEQGELF

SEQ ID NO: 276955 - protein, 58 aa, Glycine max
  Clone ID: PAT_MRT3847_92109C.1.pep
IMQGNCRFHSCLGELYCFTHTLSLNYLRTSHRFYIVVQDISGADHFPGFDNFFSLYIY

SEQ ID NO: 276956 - protein, 66 aa, Glycine max
  Clone ID: PAT_MRT3847_9210C.1.pep
KADRFRGHLCGFFKFFAALIFSPVMIFEIGFFLGGLIDSFINGFIRIGRTSLFTMPMYQIVVIGDE

SEQ ID NO: 276957 - protein, 106 aa, Glycine max
  unsure (1)..(106): unsure at all Xaa locations
  Clone ID: PAT_MRT3847_92110C.1.pep
KPALLQNIKISXRIANFSTLPGIXXNNQRXXSILKFIPLFLXRVVISSTRLISKKFPHFLSPNTTQHKYFLSSTKFNEKNNRSHACIECNHNHSFPTKLTPRNFYN

SEQ ID NO: 276958 - protein, 47 aa, Glycine max
  Clone ID: PAT_MRT3847_92111C.1.pep
DIHHWPGHVMLRGILLVEQVQQIRLISLLVIPVPSMYNKEIWQKSYR

SEQ ID NO: 276959 - protein, 94 aa, Glycine max
  unsure (1)..(94): unsure at all Xaa locations
  Clone ID: PAT_MRT3847_92112C.1.pep
EDGDVSDLVQENSVGSARHILTFLSASADDVVVLSEDNXEKEVGQDRGALVEFYAPWCGHWKKLAPEYAQLGSSFRXAISVVIGKADCAERQEF

SEQ ID NO: 276960 - protein, 293 aa, Glycine max
  unsure (1)..(293): unsure at all Xaa locations
  Clone ID: PAT_MRT3847_92113C.1.pep
MDLSHPQSNLSLGFSSSHASPPPRSDPPVPLQLMEPQTENGNLDVESDDDEDKEVEEFRILGHSMCLKRRRDCDSSSSSSAAKRVSVEPDLDARKAAVRAWGCQPLSIADPDVHEIMEKEKKRQFRGIELIASENFVCRAVMEALGSHLTNKYSEGMXPGARYYGGNQYIDEIETLCCERALNAFGLDPKCWGVNVQPYSCTSANFAVYTGLLLPGDRIMGLDTPSGGNTSHGYYTPNGKKVSGAAFFFESLAYKVNPSTGYIDYDKLEGGGAGFRPXILFXGGCSXFRVEYR

SEQ ID NO: 276961 - protein, 62 aa, Glycine max
  Clone ID: PAT_MRT3847_92114C.1.pep
VPSFWPLNVPEESCSSQSPCFLSFFFTAMIKDKEGIISYLSLYNKSLYINNNHITFLLRLHR

SEQ ID NO: 276962 - protein, 351 aa, Glycine max
  Clone ID: PAT_MRT3847_92115C.1.pep
ELEFTQEELDAVPKPDDTSDSSKTIDFLVSHSQPQQELCDTICNLNAISTSSGLGSMHLVLFKVEGNHRLPPTTLSPGDMVCVRTYDSMGAITTSCIQGFVNSFGDDGYSITVALESRHGDPTFSKLFGKSVRIDRIQGLADTLTYERNCEALMLLQKNGLRKKNPSISVVATLFGDGEDVAWLEKNHLVDWAEENLDARLGNETFDDSQQRAIAMGLNKKRPVLVIQGPPGTGKTGLLKQLIACAVQQGERVLVTAPTNAAVDNMVEKLSNVGLNIVRVGNPARISKTVGSKSLEEIVNAKLASFREEYERKKSDLRKDLRHCLRDDSLASGIRQLLKQLGRSLKKKEKQ

SEQ ID NO: 276963 - protein, 74 aa, Glycine max
  Clone ID: PAT_MRT3847_92116C.1.pep
LSIFFCVGYIHQISCSYTHPLDFSSISPPLHFPSYLSFHFLLHHLSYLSISLFLNLFLFFLFLSSFYPYYPKMG

SEQ ID NO: 276964 - protein, 79 aa, Glycine max
  Clone ID: PAT_MRT3847_92117C.1.pep
ASKLGYGCMGLTGAYNDPFPEEEGISIINHAFSKGITFFDTSDIYGPDHANEIVVGKVYKFTIDFFCISTLKIEIYISA

SEQ ID NO: 276965 - protein, 170 aa, Glycine max
  Clone ID: PAT_MRT3847_92118C.1.pep
MSFLAPAKALLSAAASLAATAMVVRSVACDLLPSELRSFISNGIHSMFSRFSPDITLIIEEMDDLDNNQIYEAAETYLSSKISPTTQRLKVSNPVTDKTFALTMEPNEPLTDVFRSVKFIWILVCRQLESHSFYNPRDLKSTLKSEFRSLELTFDKKHKEMVLNTYIAYI

SEQ ID NO: 276966 - protein, 50 aa, Glycine max
  Clone ID: PAT_MRT3847_92119C.1.pep
IGESDMIQTMQHIAMDLASKAVDFFDVAEAIRVARFIKKEFDSMHGPGWQ

SEQ ID NO: 276967 - protein, 36 aa, Glycine max
  Clone ID: PAT_MRT3847_9211C.1.pep
KNKKIKKKKKKKKKKKKKKKKKKKKKKLKKKKKKKK

SEQ ID NO: 276968 - protein, 52 aa, Glycine max
  Clone ID: PAT_MRT3847_92120C.1.pep
ASDRIYAVFIHCTKEIYDNITAVSGELAKGQSRMYMVYDCSDSRVCPSHVLD

SEQ ID NO: 276969 - protein, 45 aa, Glycine max
  Clone ID: PAT_MRT3847_92121C.1.pep
DNMTERSTYLAWLKVTTLIGALDQISEPKRPCDMQHMLQLYEVYH

SEQ ID NO: 276970 - protein, 45 aa, Glycine max
  Clone ID: PAT_MRT3847_92122C.1.pep
FHTYYQSDFPHPVFCLTVAIRQSASRNPTTLPRISYTLTPKSNAC

SEQ ID NO: 276971 - protein, 129 aa, Glycine max
  unsure (1)..(129): unsure at all Xaa locations
  Clone ID: PAT_MRT3847_92123C.1.pep
IPLNSLRTHPSASEREPHKHKGNLSQLNSAQCRMRKSNEEFPNLSLRKPPLKRSKTIPNPKHTHFSVSVSDSDEQWNYPSFLGTTTKKKKTSFKPHNLNLPKPSLVPPPSPPPAXASSTSSSPLSSQVT

SEQ ID NO: 276972 - protein, 56 aa, Glycine max
  Clone ID: PAT_MRT3847_92124C.1.pep
FLGFWPFEPEYSIGFSCGKNNFFISIRHVSSTGIYKWHSSSWNLFLSSIIMLWRTI

SEQ ID NO: 276973 - protein, 116 aa, Glycine max
  unsure (1)..(116): unsure at all Xaa locations
  Clone ID: PAT_MRT3847_92125C.1.pep
KXEKLXXXXXEGGRXXXRKXXXKXXXXGXXWXXXEXFKXLXXXFXEXXFXXXGEFXXEXGWEXXGXXXEXEXXXKXXEXEMXXXRWXMXGRLXWXFXELIVXKGVKLGEXVWVKGG

SEQ ID NO: 276974 - protein, 76 aa, Glycine max
  Clone ID: PAT_MRT3847_92126C.1.pep
PLGTHFPLFKLTSYASTFKFYTYNYNYNSRWPSLEPPILLCSAPPPTAIAYHVGSASAFAFITSPPPPPKKEDVIQ

SEQ ID NO: 276975 - protein, 63 aa, Glycine max
  Clone ID: PAT_MRT3847_92127C.1.pep
ARETERVDPSQRTHWSGVFAAARAIRESIHDKSLIARRCWYTIVLEQRSPCTVMSMTVHCVKI

SEQ ID NO: 276976 - protein, 48 aa, Glycine max
  Clone ID: PAT_MRT3847_92128C.1.pep
PHVWVSSFCSIGGFAPVCVADFPFHSKSMDSRFYFPSRPLQKDTTQTE

SEQ ID NO: 276977 - protein, 209 aa, Glycine max
  Clone ID: PAT_MRT3847_92129C.1.pep
MASTRSLILCLFIQLCFYLLPFSFAQSPATGSAEGYTIYGRVKIPSVGTKDYILPGKISNVKVILNGGQRVTFLRPDGYFAFHNVPAGTHLIEVAAIGYFFSPVRVDVSARHHGKIQAALTENRRGLSEFVLEPLKDEQYYEVREPFSIMSIVKSPMGLMMGFMLIVVFLMPKLMENMDPEEMRRAQEEMRNQGVPSLASLLPGAARSN

SEQ ID NO: 276978 - protein, 80 aa, Glycine max
  Clone ID: PAT_MRT3847_9212C.1.pep
PRVRTAARRRQKGTAPRRRQKGSYLQMLQSCIYYKTLYNKWLAFKTFNLTFHHKKYDLYRRNHMVAPFLPTCIIGFTTLT

SEQ ID NO: 276979 - protein, 93 aa, Glycine max
  Clone ID: PAT_MRT3847_92130C.1.pep
QAALTENRRGLSEFVLEPLKDEQYFEVREPFSIMSIVKSPMGLMMGFMLIVVFLMPKLMENMDPEEMRRAQEEMRNQGVPSLASLLPGAARSN

SEQ ID NO: 276980 - protein, 98 aa, Glycine max
  unsure (1)..(98): unsure at all Xaa locations
  Clone ID: PAT_MRT3847_92131C.1.pep
XPXPPPXHYXSPXPXXXTPXXLXXPXXXLPIXNXHTXXXXSXXXPXXXXXHXXXXXPXXXXXXXXLXXNXXXHXRXXXTXXPXLXLPPPEFPXXQAXA

SEQ ID NO: 276981 - protein, 539 aa, Glycine max
  Clone ID: PAT_MRT3847_92132C.1.pep
MVSLGATCALCCSMFMVFVTLSLAGDIVHPDSIAPRRPGCDNNFVLVKVPTWIDGVESCEYVGVGARFGPTLESKEKHANHTRVAIADPPDCCSKPKNKLTGEIILVHRGQCSFTTKANIAEEAGASAILIINYRTELFKMVCEANETDVDIGIPAVMLPQDAGENLKNHILNNSVVSVQLYSPLRPLVDVAEVFLWLMAVGTILCASYWSAWSARESAIEQEKLLKDASDEYVNAENAGSSAYVEISTAAAISFVVIASCFLVMLYKLMAYWFVEVLVVLFCIGGVEGLQTCLVALLSCFKWFQHAAQTFVKVPFFGAVSYLTVAVTPFCIVFAVLWGVYRRVSFAWIGQDILGITLIITVLQIVRIPNLKVGTVLLSCAFLYDIFWVFVSKWWFHESVMIVVARGDRSGEDGIPMLLKIPRMFDPWGGYSIIGFGDIILPGLLVAFSLRYDWLAKKNLRDGYFLWAMTAYGLGLLITYVALNLMDGHGQPALLYIVPFTLGTFLSLGKKRGELKVLWTRGEPKIPCPHIQENQSTNQ

SEQ ID NO: 276982 - protein, 99 aa, Glycine max
  Clone ID: PAT_MRT3847_92133C.1.pep
PPNHYPSISKAYLSQPGGTIVPRFPDLSPKKLVKAGMDREKSFGTTKDRMLFIEHCADSRAGTIFIRGGDKMIIEETKGSLQNTLCVARNLIHNHSIGY

SEQ ID NO: 276983 - protein, 90 aa, Glycine max
  unsure (1)..(90): unsure at all Xaa locations
  Clone ID: PAT_MRT3847_92134C.1.pep
IFKPXXILHSTHTRRXMGSILHYFLXLSHXXSFLXXXPTQSPLQNQXTXXXYPHKSTEPQGTXGLNXXKRTXLXXXXDXAAXXXKXPXGX

SEQ ID NO: 276984 - protein, 81 aa, Glycine max
  Clone ID: PAT_MRT3847_92135C.1.pep
AIHSMLNECHIHLSGLYEAVLTNIYACNQLSTITRTSLGPNGMNKMVINHLAKLFVTNDAGTIVNELEIHHPAANVFGFGL

SEQ ID NO: 276985 - protein, 101 aa, Glycine max
  unsure (1)..(101): unsure at all Xaa locations
  Clone ID: PAT_MRT3847_92136C.1.pep
MQCHRVSAVLFLSLCFRIALVYAQGEPHLTALDQHWFPGTATWYGDXEGDGSTGGACGYGTLVDVKPLKARVGAVGSVLFKKGEGCGACYKVKXLDHSICS

SEQ ID NO: 276986 - protein, 32 aa, Glycine max
  unsure (1)..(32): unsure at all Xaa locations
  Clone ID: PAT_MRT3847_92137C.1.pep
XIHYFHLCHKTYXTPDQLEXAPPSXXSKSLQX

SEQ ID NO: 276987 - protein, 45 aa, Glycine max
  Clone ID: PAT_MRT3847_92138C.1.pep
KSVFVQLLGTSVSTSYVTVFYSCVEVCADNNFTHVSHVTMITPAC

SEQ ID NO: 276988 - protein, 90 aa, Glycine max
  Clone ID: PAT_MRT3847_92139C.1.pep
RFASCPMHHILHLCMSSQSLILHFLNLHDSNFRRCQFSASRFLDSSVVRSPLVLASDSLVCPQSRMAPTDQILLLFHIHAHVRPIHTIPI

SEQ ID NO: 276989 - protein, 88 aa, Glycine max
  unsure (1)..(88): unsure at all Xaa locations
  Clone ID: PAT_MRT3847_9213C.1.pep
EPNDPYRNITINWDNKSWTPDGYVAVATMNNFQQYRHIXEPGWTVVWTWAKKEVIWYMVGGQTTEQGEXTKHKGNIQHWCKKNHGDAD

SEQ ID NO: 276990 - protein, 74 aa, Glycine max
  Clone ID: PAT_MRT3847_92140C.1.pep
LRKRISGVGVYSIGTKLLNSTVGPSPFRPPKMDLATLSPYCNLLVPKQENVQRVQLGGKYFDRAALGDAYQDGI

SEQ ID NO: 276991 - protein, 89 aa, Glycine max
  Clone ID: PAT_MRT3847_92141C.1.pep
CKTCPPGMDWRREGVPAVICGPQAQRPSIHSSAFLLLSVLERWRRASPDLGPARERSQVKTRPLRPFTLRGQFWNETPLVKENCVDCIV

SEQ ID NO: 276992 - protein, 96 aa, Glycine max
  unsure (1)..(96): unsure at all Xaa locations
  Clone ID: PAT_MRT3847_92142C.1.pep
ERTTYTKRNRVVSQVISYLTAYLRFDGALNVDVTELKNNLGPYPRIHIMISYXDTDISAFFFYQEQLSGAEIINLCFKPSNMMDKXDKRHGKANGC

SEQ ID NO: 276993 - protein, 55 aa, Glycine max
  Clone ID: PAT_MRT3847_92143C.1.pep
KRNGGKKQARVEGAMVCFMLVIRYQKLKKRCYLADGWLRLIGYPGLNENLSFTYC

SEQ ID NO: 276994 - protein, 132 aa, Glycine max
  unsure (1)..(132): unsure at all Xaa locations
  Clone ID: PAT_MRT3847_92144C.1.pep
YHLDILYNLSTVMYYTVILCSLMLDTNEAEIPTGCLIYGKPIPLQEXQKITIYRTDYDIKEYHEMISITYXKLPGHFNSENTILCSDGTSTLTVLSCDPDADTVKCRYENTATIPDRENDTLPGDLANLPTL

SEQ ID NO: 276995 - protein, 87 aa, Glycine max
  unsure (1)..(87): unsure at all Xaa locations
  Clone ID: PAT_MRT3847_92145C.1.pep
ASPNKLTTPPPGFEGKTKKKEWVAGLSQMGPPHELIXHQGRPLPLDLEFFYKPLMAPLPKVGTKIRGQGLSIKTKNPFFSCFFFLGD

SEQ ID NO: 276996 - protein, 151 aa, Glycine max
  Clone ID: PAT_MRT3847_92146C.1.pep
VRNLLDAQVPPCDIFSKREMSKFLGSRKISPPSYVNYQIRRSECSLQPRNMNITRLQGGVNVSSSDNPKPKSLGPESSNGSAHVDHPSREFQIAVSSNRKVVNGSTCSSVRTTVNEFSEREMPYMTNANASIIVKDDSDNVTTTSQRLKII

SEQ ID NO: 276997 - protein, 85 aa, Glycine max
  Clone ID: PAT_MRT3847_92147C.1.pep
PGRPSVLINTKLFLLLPPATNQPSNLSPIHALLFPCPLKLIRGIYNMCDPPLTSSASEAQGGSGTHRKRAVFLLSKPNRTKLTLK

SEQ ID NO: 276998 - protein, 72 aa, Glycine max
  Clone ID: PAT_MRT3847_92148C.1.pep
KKKLIFNRTKTMTIYKNKQNVHMKNRKGLCKHTPVKYTATLHESHTGQLGDTPLKKKRNPPQWEKKALILLT

SEQ ID NO: 276999 - protein, 64 aa, Glycine max
  Clone ID: PAT_MRT3847_92149C.1.pep
INVFLTKRTDKSYINISNLNVIKKLFITSIIMLLINGIISYNKLQIQFSIIYMILIISFFTSNY

SEQ ID NO: 277000 - protein, 98 aa, Glycine max
  unsure (1)..(98): unsure at all Xaa locations
  Clone ID: PAT_MRT3847_9214C.1.pep
MVFLKLWAGSYFLLHECSSFNNGEYLKSCLHHSQQWPLKPTYQFTRSSCSXLKHIHQAVISLVFHHKTQKSLXDITNELCPELIFSHIYLIRTIFLHD

SEQ ID NO: 277001 - protein, 54 aa, Glycine max
  unsure (1)..(54): unsure at all Xaa locations
  Clone ID: PAT_MRT3847_92150C.1.pep
IRLEGLTINSPYLTHPIFNTYHTEHGGVRYMGRAXSKDFALCHIMIPLRTCSMN

SEQ ID NO: 277002 - protein, 110 aa, Glycine max
  unsure (1)..(110): unsure at all Xaa locations
  Clone ID: PAT_MRT3847_92151C.1.pep
LSRSNCPRSCHRGHLLSYYSYAGKLSMRVVVWVPWGRTRGGSQLVLNRLVTYGWCHQLRTSRVSWHLVNLTGGVVSINRRPICPLKVTVRQIRVPACNMHTVXMSGHGVP

SEQ ID NO: 277003 - protein, 30 aa, Glycine max
  Clone ID: PAT_MRT3847_92152C.1.pep
VITFYYLKRFYAQINFLIILIFDYIVKFTT

SEQ ID NO: 277004 - protein, 93 aa, Glycine max
  Clone ID: PAT_MRT3847_92153C.1.pep
HASTIPNFKSYMVCGANKGDINDRQKGKDRAIKDVLYNKKYPCGVCNLVVHLVYKLPFPSPTSLFHLETSVNFCTHKSPMLAAPYLPIHITGK

SEQ ID NO: 277005 - protein, 53 aa, Glycine max
  Clone ID: PAT_MRT3847_92154C.1.pep
ETWGQTKRPIYGRDVTTEPFFQRLEVKKKSCPPTKPPPKGLWRATGGGGGSFI

SEQ ID NO: 277006 - protein, 113 aa, Glycine max
  Clone ID: PAT_MRT3847_92155C.1.pep
HLLTSEKIIPQSICSRYGLAIGATVAPVVRVLVWLLDFLLGHRHKALFHRAELKTLVNLHGHEAGKGGELTHHETTIIAGALELAEKTAGDAMTPITEAFCIDINSKLDMYLM

SEQ ID NO: 277007 - protein, 92 aa, Glycine max
  Clone ID: PAT_MRT3847_92156C.1.pep
GDHVAVKALPAMSTRPSYDDGSNAEMGILGLCRQRHIVRFLGSCSNHDINLLVYQYMPNGTLRDVLHGKNGGHFHLDPQYSIAVEAVMVLCH

SEQ ID NO: 277008 - protein, 362 aa, Glycine max
  Clone ID: PAT_MRT3847_92157C.1.pep
MTQNAIVSKTKSGINRDITVPQKPLAAAAAAGGYIPIPRRRVLKNLEINAWVDSMRSSSPTNSKSTSSLAEEHSTWILRHPSALDMFEQIMDASRGKQIVMFLDYDGTLSPIVDDPDRAFMSDSMRRTVRKLARCFPTAIVTGRCKDKVYSFVRLAELYYAGSHGMDIQGPTRTSKYSNQDKGEPVLFQPASEFLPMIDEVYHEKFCCSKSIPGAKVENNKFCCSVHFRCVDEKKWSELAQEVRSVLKEYPKLRLNQGRKVLEIRPSIKWDKGKALEFLLESLGFANCNDVFPVYIGDDKTDEDAFKKLRDRGQGFGILVSKFPKDTTASYSLQEPNEVMDFLQRLVEWKQVSLRLRTRSRV

SEQ ID NO: 277009 - protein, 61 aa, Glycine max
  Clone ID: PAT_MRT3847_92158C.1.pep
QRMTGSSLGFPFSPTRNFKKHGAWFTPLGDLGYRGFGTGYYWNSIRLNVRCNHCFYLITIT

SEQ ID NO: 277010 - protein, 44 aa, Glycine max
  Clone ID: PAT_MRT3847_92159C.1.pep
LSSYNFRLRIHCSGSLSSPFSVPSNTRAMNKKAYTVFPTKLRYG

SEQ ID NO: 277011 - protein, 232 aa, Glycine max
  unsure (1)..(232): unsure at all Xaa locations
  Clone ID: PAT_MRT3847_9215C.1.pep
MDIAFFSTEFYKNQATRKPNIAVVGSGPSGLFAALVLAELGADVTLIERGQPVEKRGRDIGALVVRRILELESNFCFGXGTWSDGKLVTRIGRNSGSVLAVMRTLVHFGAPKQILIDATAHLGTDRLVPLLRNFRQHLQNLGVTIKFGTKVDDLVIKDRHVLGVMVSESADKLHLTSQKMEYDAVILAVGHSARYIYEVLLAHNVELIPKDFTVGLRIEHPQELINSIQFCI

SEQ ID NO: 277012 - protein, 221 aa, Glycine max
  Clone ID: PAT_MRT3847_92160C.1.pep
MKNCELCKLPARTFCESDQASLCWDCDAKVHGANFLVERHTRTLLCHACQSPTPWKASGAALGNTVSLCERCAGGTTEQGQESQGGNDDDIDTDIDTDDEDDYDESEDEVAADEEDGDNQVVPWSSEPPPPAPSSSSSEESVSRCNNVDEVSTTLKRRRQEDNDFQGWNSNNWGCERSEVERGGWLVRLRRRTADDVAVEQRSARAASPDGCCGDRASEDV

SEQ ID NO: 277013 - protein, 80 aa, Glycine max
  Clone ID: PAT_MRT3847_92161C.1.pep
MKTPDDIQILHTDTLVKEVERVFNANHPDALEIEQVKKILKDHEQALIDAIARLADLSDDDSDTDEEGSHHFSHAQAMAH

SEQ ID NO: 277014 - protein, 169 aa, Glycine max
  unsure (1)..(169): unsure at all Xaa locations
  Clone ID: PAT_MRT3847_92162C.1.pep
AAASPMASQLKSTFTRTLVTPKGLSASSPLHLVPSKKQFNFTVKAIQSKKPTYQVIQPINGDPFIGSLETPVTSNPLITWYLSNLPAYKTAVSPLLRRIKVGLAHRYLLVGPFXKAEPLKNTXITRQTDSLATSRLIVILNLYLTIYKISSFTEXTPFTTPSLTFTSAK

SEQ ID NO: 277015 - protein, 116 aa, Glycine max
  unsure (1)..(116): unsure at all Xaa locations
  Clone ID: PAT_MRT3847_92163C.1.pep
MLSHITAAQYIGMCYGMMGDNLPSRXEAAYLYKTQGIVGMRIYYTVEESLEVLRGXSIVLIMDMYNVTLQSXTDLNACTDCVIQYGTPYSRDANFKFIDVGNEIHTSTTVAQYILC

SEQ ID NO: 277016 - protein, 84 aa, Glycine max
  Clone ID: PAT_MRT3847_92164C.1.pep
NFRYSVFFINYLSIWSSISMSVSRQLYRWSVEELRLASGAEGVTRLQHQLKLCSAYSGVPVCCIPKSTPTSIKSLKSNISATSL

SEQ ID NO: 277017 - protein, 109 aa, Glycine max
  unsure (1)..(109): unsure at all Xaa locations
  Clone ID: PAT_MRT3847_92165C.1.pep
GCETTEGGICQVVGDDLLMSNAKRIERAITESACNALLLKVNQVGTITEVIEVVKLAKEAHWGVVTSHRCXETIDSFIADLSVGLASGVIKAGAPCRGERLEKYNQVSF

SEQ ID NO: 277018 - protein, 126 aa, Glycine max
  Clone ID: PAT_MRT3847_92166C.1.pep
VLMSRNGVKFGESVWLKAGYQIFSEGGLDYLGNPSLVHAQSILCIWATQGILTGAAEGYLIAGGPLCEGTDPIYPVGSFYPLGLADDPQALAALNVKELKNGRLAMFSMVGFLVQAIVTGQGPLEN

SEQ ID NO: 277019 - protein, 84 aa, Glycine max
  unsure (1)..(84): unsure at all Xaa locations
  Clone ID: PAT_MRT3847_92167C.1.pep
SGVKKLIDSRCQASVGVISNPSLGDRALRKAGHNPWLGLRPAVRGVAMNPLHHPHGGRDGKINSGGRSVQGSLTPXGKPTKSGY

SEQ ID NO: 277020 - protein, 60 aa, Glycine max
  Clone ID: PAT_MRT3847_92168C.1.pep
ETTEINLLSLLHLQWLFQYLILAIKGSCLTLMHFSSHCHYRLARHSQLLKLIVMFQVTAF

SEQ ID NO: 277021 - protein, 98 aa, Glycine max
  Clone ID: PAT_MRT3847_92169C.1.pep
MDCRNRDSITENHTSSSSSSSSSSSSSSSSSCDSLSEALLFTTMCIVGHPVDVHVKDGSVYSGIFHTASVHADYGSFPLFSLVDFFTLFFSGKFGSFV

SEQ ID NO: 277022 - protein, 73 aa, Glycine max
  Clone ID: PAT_MRT3847_9216C.1.pep
FYHGVSCTHILREHYKYLLILRRTKYCQFSLSIRFLTTNRTKVQQTIPILLMTIQLQCTKTAIASNLKHNVFH

SEQ ID NO: 277023 - protein, 63 aa, Glycine max
  unsure (1)..(63): unsure at all Xaa locations
  Clone ID: PAT_MRT3847_92170C.1.pep
MGLSFTKLSISLFAKKEMRFLIVGLDAAGKTTILYKLKLGEIVTTIPTIRFNVETFXYKNISF

SEQ ID NO: 277024 - protein, 130 aa, Glycine max
  Clone ID: PAT_MRT3847_92171C.1.pep
ARRHRRGNPYALYGIPNPKNNQKNREVGSTTTYDGHGSEVVTDGAMTMEGQTVWIHGMTTNSSSNAIKREAEGAGFLNFCTERHFRHFSKIIGCTKKNLLHTMLESVPTMGIVQRCSSPRPMAKRHPNKL

SEQ ID NO: 277025 - protein, 66 aa, Glycine max
  Clone ID: PAT_MRT3847_92172C.1.pep
GMALTWTIWKHRNTIIFSNGSFNANGILDDAIFLLWTWLTNLEKDFNTHYNYWSSNIRAGFLNRIG

SEQ ID NO: 277026 - protein, 35 aa, Glycine max
  Clone ID: PAT_MRT3847_92173C.1.pep
PTRKQNSLNLTLDEVLTPKGFMLDLKISQSNIALP

SEQ ID NO: 277027 - protein, 125 aa, Glycine max
  unsure (1)..(125): unsure at all Xaa locations
  Clone ID: PAT_MRT3847_92174C.1.pep
LLLALRCVVPDAPQRPKMGHVILMLEAAALLFHPAQRTEGESSRSYQSFCPPPPPPXGVVFGVVVXXGXPPPXPPRLQXXXXXALXCLVFGLYPVFPSLVSGVPFSPCQKFLFCFFLXLVXXRXP

SEQ ID NO: 277028 - protein, 157 aa, Glycine max
  unsure (1)..(157): unsure at all Xaa locations
  Clone ID: PAT_MRT3847_92175C.1.pep
LTRGPNEKWTHSEHRVKVPELLANYCDLLLRKSALTKKFSSEEIDXERLNNVLLVLKYVTAKDVFMRYHKTHLSRRLILELVADXEKEEMLNLALRKSLENGSCSQMADCVSVKILNAGAWSRSRDRSHLTLPRELEDLTPEVEDFYKKXHCGRKLN

SEQ ID NO: 277029 - protein, 119 aa, Glycine max
  Clone ID: PAT_MRT3847_92176C.1.pep
IQIFDYLENGAGICFTVKENCGHKCWTQKYGGWRNLDVTRRTNESLWWWDLSFIYNSTEGSWFKSGSKWKIGCGSKVMFWEDGWKDDGISLMEKYPRLYNISQQQNQYIQQMRTTSGTR

SEQ ID NO: 277030 - protein, 69 aa, Glycine max
  Clone ID: PAT_MRT3847_92177C.1.pep
LLFSGQEPTIHMVHEIMMLHVAITITVTTTPVDAVINIIISQTRGPALFCGIQFGFGHGCCEAYAYAYA

SEQ ID NO: 277031 - protein, 89 aa, Glycine max
  unsure (1)..(89): unsure at all Xaa locations
  Clone ID: PAT_MRT3847_92178C.1.pep
LKTRRRPQPVPPKCCVFSFLLRFRFRSRQXHQQQLTTPLFFSSFFCSFGLFFFLWFFISEIGQHGSGGLLKERHPRISVSFKKKRNPIL

SEQ ID NO: 277032 - protein, 33 aa, Glycine max
  Clone ID: PAT_MRT3847_92179C.1.pep
TRRESQALFTTRLNEAYEGGISGQHLSKVRGVS

SEQ ID NO: 277033 - protein, 84 aa, Glycine max
  unsure (1)..(84): unsure at all Xaa locations
  Clone ID: PAT_MRT3847_9217C.1.pep
VGNAGMVTGGSYKVRVGVVKLIDQHNLCEHSIHVQYASVLGGSSWSGHVFLSDRRSIPWVSHPKDXGVLVSSIVKAIKRHAAQN

SEQ ID NO: 277034 - protein, 70 aa, Glycine max
  Clone ID: PAT_MRT3847_92180C.1.pep
VRSCVSTNLADVRHTTALIVCNGFLIIGFTNDWCKHARHAGNSVFYVNIQCDDTSRGRNTDTVRVQWLIK

SEQ ID NO: 277035 - protein, 81 aa, Glycine max
  unsure (1)..(81): unsure at all Xaa locations
  Clone ID: PAT_MRT3847_92181C.1.pep
INXNNMPPTNGCVHSIVRVVNRVIWREAETTKGDISQKKKGPVKRVSRLIASLPQQNLILFQREFIQFRLITPSSTYVTYT

SEQ ID NO: 277036 - protein, 64 aa, Glycine max
  Clone ID: PAT_MRT3847_92182C.1.pep
LTDRWVYMGPFTFETQSLLLYYYKSLSMYDNFQYWAIMLRFPNVGQPIATFKFSIWNLCIGGWV

SEQ ID NO: 277037 - protein, 64 aa, Glycine max
  Clone ID: PAT_MRT3847_92183C.1.pep
MDCGLFTIYRNLKPVKILGLRCVESPDANSIVLKHVINSINQCLHLNTRFNPHYYSITVVCNSM

SEQ ID NO: 277038 - protein, 54 aa, Glycine max
  Clone ID: PAT_MRT3847_92184C.1.pep
LIHHVRLWFKTIPCMHNTVLTFRTPRCCTIFPHRGRSGRELMLSPLYGNGKSQQ

SEQ ID NO: 277039 - protein, 84 aa, Glycine max
  unsure (1)..(84): unsure at all Xaa locations
  Clone ID: PAT_MRT3847_92185C.1.pep
IPXEPLIKPHSCLSLXXXPYMTFEGKGGFMQMRELILVHXXXSXPXXXXLPPXPXXXXXXXXXFXQNDPHHTHMGYYQKDKPRC

SEQ ID NO: 277040 - protein, 77 aa, Glycine max
  Clone ID: PAT_MRT3847_92186C.1.pep
DCQKSVAIDRDILGREKGQGQRCTTTRLLGEEQMIMRVRAITSAMRSPMKSIHNSVQAIVVPWSCVSLARAKRSKGF

SEQ ID NO: 277041 - protein, 48 aa, Glycine max
  Clone ID: PAT_MRT3847_92187C.1.pep
FSIFRFYRITSGALKFYACKISADGQINRDAGGCPGGGAPCHLVPQTV

SEQ ID NO: 277042 - protein, 57 aa, Glycine max
  Clone ID: PAT_MRT3847_92188C.1.pep
GSSLTYKERTIAIYQVLRTRKDRIHISLVVTPPYSPHTNQDATPSSRPNNHPLMLRI

SEQ ID NO: 277043 - protein, 121 aa, Glycine max
  Clone ID: PAT_MRT3847_92189C.1.pep
VIRRSEVASLLSASASVSSIASDLAASSGSLSYSTPSVAVAIPKPPQKPKPEKSESIANTETHENLVERRITKRKVNERSQLETPNPKGERERENEGLIIGWGGESGRQGLRLAKTKPDAW

SEQ ID NO: 277044 - protein, 394 aa, Glycine max
  Clone ID: PAT_MRT3847_9218C.1.pep
PQASGAYVFRPNGSFSIKSDHQASFTVLRGPILDEVHQQLNPWVSQITRIFKAKEHAEIEFTVGPIPVDDDIGKEIITQFKTTMKTNKTFYTDSNGRDFIKRIRDFRTDWDLQVNQPIAGNYYPVNLGIYVQDSSMELSVLVDRSVGGSSLEDGQVELMLHRRLLHDDARGVGEVLNETVCVADKCEGLTIQGKLYLRIDHKGEAAKWRRTVGQELYSPLLLAFTEQDGDNWLHFSPSTFSGIDSSYSLPDNTALLTLQEFKNGKVLLRLAHLYEIGEDKNYSLTASVELKKLFPNKKINKVTEMSLSANQERAQMEKRKLDWKVEGSTEEPKVVKGGPVDPTKLVVELAPMKIRTFFIEFDPLQPVPAPENHVAMKQSTPKLSRSLGNKEYYC

SEQ ID NO: 277045 - protein, 60 aa, Glycine max
  Clone ID: PAT_MRT3847_92190C.1.pep
FFFFFFFFFFFFFFFFFWFFFGFFFRKAKLMPKRLSWGFKSPNYFLGEKKKGWGGTKTNP

SEQ ID NO: 277046 - protein, 99 aa, Glycine max
  unsure (1)..(99): unsure at all Xaa locations
  Clone ID: PAT_MRT3847_92191C.1.pep
PNFFLIDXHGLSTSDRNRRYPTSSTLAKDPSHIQRVPDGAXMIQADYKIRPDVLLRWCGNRGFHMTRCLKLRRESIXRRPAIFALSNPTMQGECPYVDA

SEQ ID NO: 277047 - protein, 50 aa, Glycine max
  Clone ID: PAT_MRT3847_92192C.1.pep
RVAGRLGSTTVPTAYFSLFPSSHPRPILFHLKRMLFVADQVTREKGEKRS

SEQ ID NO: 277048 - protein, 58 aa, Glycine max
  unsure (1)..(58): unsure at all Xaa locations
  Clone ID: PAT_MRT3847_92193C.1.pep
NKKAGCKSMLKKKAFVQQLESSWIRLNXLEQEPQPARTXGMFLGGGALLGGEQGLPVT

SEQ ID NO: 277049 - protein, 37 aa, Glycine max
  Clone ID: PAT_MRT3847_92194C.1.pep
YIYYLFKENLFDLHLNRMIFSLGLEIVFQFAETYTNY

SEQ ID NO: 277050 - protein, 58 aa, Glycine max
  Clone ID: PAT_MRT3847_92195C.1.pep
TDRASLLLSPRQLMHVDLYLSRVIRPPQNSSYTTHYDVMLLEEKLKQVSEEEDKEIAR

SEQ ID NO: 277051 - protein, 67 aa, Glycine max
  Clone ID: PAT_MRT3847_92196C.1.pep
LQDFSFMCNFVNQRMHRRKKNRCFSLVRCCDLNYLQIRFDCSMTTTPERIFLGVTTQLSLCWEECLT

SEQ ID NO: 277052 - protein, 155 aa, Glycine max
  Clone ID: PAT_MRT3847_92197C.1.pep
MPSLMELLPLAVAFAAVIGGFLWYSSNSGGSRKVLKPTEFQEFKLSEKTVLSHNTAIYRLELPRPTDILGLPIGQHISLAATIEGQPKEVVRSYTPITSDEDKGHVDLLIKSYPTGNISKHVAGLKIGDTIKVKGPKGAMVYTPNMVRHFGMIAG

SEQ ID NO: 277053 - protein, 138 aa, Glycine max
  Clone ID: PAT_MRT3847_92198C.1.pep
KQGCIHCNDSSTLSIFWQIPQYAFIGASEVFMYVGQLEFFNAQTPDGLKSFGSALCMTSISLGNYVSSLLVSVVMKISTEDHMPGWIPGNLNKGHLDRFYFLLAALTSIDLIAYIACAKWYKSIQLEANTGEIDEPEV

SEQ ID NO: 277054 - protein, 352 aa, Glycine max
  Clone ID: PAT_MRT3847_92199C.1.pep
LYCAQWCGVLACRVISYIAPLHLLSGLVVMALFVLSLLFFSFLMGSSESQLQVGFYSNTCPQVDSIIRAVVRDAVLSDPNMAAVLLRLHFHDCFAQGCDGSILIENGPQSERHAFGHQGVRGFEVIERAKAQLEGSCPGLVSCADIVALAARDAVVMANGPAYQVPTGRRDGLVSNLSLADDMPDVSDSIELLKTKFLNKGLTVKDLVLLSGAHTIGTTACFFMTRRLYNFFPSGEGSDPAIRQNFLPRLKARCPQNGDVNIRLAIDEGSEQKFDINILKNIREGFAVLESDARLNDDIATKNVIDSYVSPFSPMFGPSFEADFVESVVKMGQIGVKTGFLGEIRRVCSAFN

SEQ ID NO: 277055 - protein, 75 aa, Glycine max
  Clone ID: PAT_MRT3847_9219C.1.pep
SEFGSSFVFHLKSFFFLIYDGCENFFQSLLLGIGYINRKRKTRTQMSWKRLEKRKKSTEKRCATLITLSRKTKAR

SEQ ID NO: 277056 - protein, 76 aa, Glycine max
  Clone ID: PAT_MRT3847_921C.1.pep
EWRGQNKLEEGKAVATVLSIGTANPPNFILQEDYPDFYFRVTNSDHLHRLKQKFKRICMFLIFASHSLAYIFLITL

SEQ ID NO: 277057 - protein, 66 aa, Glycine max
  Clone ID: PAT_MRT3847_92200C.1.pep
HAIHYTSQQHQGNYEFRTYIMSDAVYLFLLSDHFQGTTFMYLLSDHFQGTAFMYLLSDHFQCITFL

SEQ ID NO: 277058 - protein, 44 aa, Glycine max
  Clone ID: PAT_MRT3847_92201C.1.pep
GSPTGLLPRIKVQVGSMSPPPNPKSKFIPPFFWEFLIFFPGRGS

SEQ ID NO: 277059 - protein, 89 aa, Glycine max
  unsure (1)..(89): unsure at all Xaa locations
  Clone ID: PAT_MRT3847_92202C.1.pep
SYGFNSXFPSSLQTPKLSVLKLSSLCLXRFSYLKPGRKGVGPFPEKRXXGXXDPXQQXSRVDVRTPGQTVKXAXXSRRFGFFFRXDGPV

SEQ ID NO: 277060 - protein, 96 aa, Glycine max
  unsure (1)..(96): unsure at all Xaa locations
  Clone ID: PAT_MRT3847_92203C.1.pep
GHLRGDYAVQGPKGPIGANECLQKKFKTGVGVGLLPLFVSVWXLQQERESFFGGISFSPMFSEGRLPKRFQRSPRKKNIAKGWRLSQKKKNKKKTQ

SEQ ID NO: 277061 - protein, 315 aa, Glycine max
  Clone ID: PAT_MRT3847_92204C.1.pep
NSARGFDQFYQDRDSEPMIPTDSLRCLNKACIKNTGTVSNPDVSVSDPWSQCTVGQVESLKSLVRLLPMWSSGVLMMVSQGSFSTLQATTLDRRLFGNFKMPAGSFNLIMILTLSIVIPLYDRIMVPLLAKYRGLPNGFGCKTRIGIGLLFVCAAKATSAVVETMRRNAAIEQGFEDQPNAVIDMSVFWLFPEFVLLGIGEAFNSVAQVEFFYTCIPKTMSSFAMALFTLELAAANVVGSVLVSIVDKVTSVGGNESWIATNINRGHLNYYYALLTCLGLINYLYFLAISLAYGPPPGQKLKLEEKFDCRKLPTS

SEQ ID NO: 277062 - protein, 144 aa, Glycine max
  Clone ID: PAT_MRT3847_92205C.1.pep
HKPKKKQRGGKHAKRQPHPQETKKGRQPTQPKPRPQTEGPTTPREAGHPPKGQNSRPRNQAPPKARKGTPRPKTKPPTRKNPSQEPPDKRAKHERAQDTRKRTGTTPQGKPAPNSAQPPQKKHPSATQRGPPGKGTTPRTPHPT

SEQ ID NO: 277063 - protein, 55 aa, Glycine max
  Clone ID: PAT_MRT3847_92206C.1.pep
VVIWKRNISVVLHHQAPKVVVSKKTRSVVFFTLYLVIVINKLTRAAFCRIRTDAW

SEQ ID NO: 277064 - protein, 86 aa, Glycine max
  Clone ID: PAT_MRT3847_92207C.1.pep
KISPLKNFFTRKISQPAKKISLPKPKNFRDRVSKSITSNLTKKGEKKFNNQEPSTFGLGPWPSKSPVYIWGGSLGFTFFRNFLLGG

SEQ ID NO: 277065 - protein, 60 aa, Glycine max
  Clone ID: PAT_MRT3847_92208C.1.pep
FNTLKNLNGHCFNIHIRGKSNLFGGVLQKLLRRGFNLVSSGGGRLLNLFFFSLYTNKSED

SEQ ID NO: 277066 - protein, 282 aa, Glycine max
  Clone ID: PAT_MRT3847_92209C.1.pep
RISFPASIIFSSQSGGKMSGRSSRTIYVGNLPGDVRLREVEDLFYKYGPIVDIDLKIPPRPPGYAFVEFEDARDAEDAIQYRDGYNFDGFRLRVELAHGGRGYSSSVDRYSSYSGGSGSRGVSRRSDYRVLVTGLPPSASWQDLKDHMRKAGDVCFSQVFRERGGMTGIVDYTNYDDMKYAIRKLDDSEFRNAFSRAFIRVREYDRGYSRSPSRDSRRSYSRSLSRSPCISRSRSHSRSRSHSYSDRSRSWSPKPKHSRRSISLSRSVSTKSDTYAVLCSVL

SEQ ID NO: 277067 - protein, 81 aa, Glycine max
  Clone ID: PAT_MRT3847_9220C.1.pep
LWLFQCVYHSRSVDLTRLIEVVFILYTREVLMLMCKQESSLLYEHHKHTASCTLAHTHALHFTYSTCEISMFIVAYYALAR

SEQ ID NO: 277068 - protein, 118 aa, Glycine max
  unsure (1)..(118): unsure at all Xaa locations
  Clone ID: PAT_MRT3847_92210C.1.pep
DIHSANTDQWFGVGDERKCIPNFGFIEEPIRMESILVPMKDYFFXRLVTKRRGSLGAKKRSVEVMRHSLDAXMSAARSDMSWGDANYHQETLLKXGVAMISTKKLCAWYAIYLRLRLT

SEQ ID NO: 277069 - protein, 54 aa, Glycine max
  Clone ID: PAT_MRT3847_92211C.1.pep
VFLNRKVQYMRHKDSVFPCKVNPGRQEIGQNFRSSGEKVSPIETKFRGQQAYYL

SEQ ID NO: 277070 - protein, 80 aa, Glycine max
  unsure (1)..(80): unsure at all Xaa locations
  Clone ID: PAT_MRT3847_92212C.1.pep
MAKDPVRVXVTGAAGQIGYALVPMIARGVMLXPDQXVXLXMVXLPPAAESXXXXXXXLXXXXXXVASKXXXLTTXVGEXA

SEQ ID NO: 277071 - protein, 148 aa, Glycine max
  unsure (1)..(148): unsure at all Xaa locations
  Clone ID: PAT_MRT3847_92213C.1.pep
QKRLHSTILTNSRPVDNIDDIRASIKFIKNSCNITQDPSLSIQYVYVYASTIQXDPDEFDQTALIPLRQPHRGHNNLCCKMQQIRGLKSGHXDGLEGMMLNKFSDSGERLNRSLKELKLCTVKGEDFTXEIHNVDTRVSSNLTEESTR

SEQ ID NO: 277072 - protein, 92 aa, Glycine max
  Clone ID: PAT_MRT3847_92214C.1.pep
MVNSLYDELLQEILQKLPSSSSSSVSLVCKRWLRLHRSSTTSLSLRLTTPHFSLIPSLSSFLSHHPFLSSLSLSLYPPLSLSPHLLSFITPF

SEQ ID NO: 277073 - protein, 71 aa, Glycine max
  unsure (1)..(71): unsure at all Xaa locations
  Clone ID: PAT_MRT3847_92217C.1.pep
LQAGSNEEEALIYVAGVDISLSKDDPSRACGTLVVLDFHTVXVVYQDYYLATLQVPYVPGCLAFREAPGLL

SEQ ID NO: 277074 - protein, 91 aa, Glycine max
  Clone ID: PAT_MRT3847_9221C.1.pep
EDRASTPSLTSDSASSPNFPCLTFLPLEFILEVRRKFLNFVRFILKKRAKLSCQVGINPYSMEWTGLANKLLSKGNDILCCDYACFDGFDY

SEQ ID NO: 277075 - protein, 70 aa, Glycine max
  Clone ID: PAT_MRT3847_92220C.1.pep
KPLLFVYSSVVGVFKTPGFSSPIGCFFFCPFRFLFPPCFVVPPLFFFFFSPTGWGGFFFQASSKKISSIS

SEQ ID NO: 277076 - protein, 86 aa, Glycine max
  unsure (1)..(86): unsure at all Xaa locations
  Clone ID: PAT_MRT3847_92221C.1.pep
MALMGGFALIYNXDITVLVSXPKNGSNIDPQXAQQALXTAQADLCQSEGQALTIEATLDLRRARTLVEAINVISYQVHGSENRRNS

SEQ ID NO: 277077 - protein, 87 aa, Glycine max
  Clone ID: PAT_MRT3847_92222C.1.pep
FWLLTGIIRNESTTIDRYRVEINLHEKGSFKIILYSHHSFFKICYKKEIIKIKSHPKSLSRLSYRLDITIFRWIWRASRRVEGQTMI

SEQ ID NO: 277078 - protein, 74 aa, Glycine max
  Clone ID: PAT_MRT3847_92223C.1.pep
LKKVSEKASKLMSSLFQQILIFKQTKYKALALPNNPPKARCIIQKPVQHLTTFIGFNASHKFFKKTLNNWPPKK

SEQ ID NO: 277079 - protein, 96 aa, Glycine max
  Clone ID: PAT_MRT3847_92224C.1.pep
ADISLTGGSNHHKQTDFGKLQPQRRTGNSLKGFLGLVTKQGNSPHNFWIPERKNNGGKRNLTGPPKKIRNWGKPKGKTIQGGGVWKAQPFLIGQRQ

SEQ ID NO: 277080 - protein, 142 aa, Glycine max
  Clone ID: PAT_MRT3847_92225C.1.pep
MLIKGNQIKAPILVLNFFLVLICSTSSSVNGVESRKLDETPVPATNGTEEKCGSCGGTTYPSPPPPVLPPPSPPPPSPKKQPPSQYCPPPPPSSFIYITGPPGNLYPVDENFSGAISHRHRRSFATMLLPLLVGLFSTLAFW

SEQ ID NO: 277081 - protein, 155 aa, Glycine max
  Clone ID: PAT_MRT3847_92226C.1.pep
FFFFFFTVHPHLDYFLFHGSHISKTMNHLVRRGNPVLGRVPLPETLKEERTQGSLCSGGPPGQGTHINALRGGGTTGTTYPVPPPSPGPKKKKGEKVPRGKPHRETKHPLFFKREKSLNPPQGNRGKKNKKPFFLGGGKRPPPRGKQGKSFLGGP

SEQ ID NO: 277082 - protein, 111 aa, Glycine max
  Clone ID: PAT_MRT3847_92227C.1.pep
PLSHCAGAEHHTKSSKYYTGTLYSTMLRRGSTRCHHTGYLNQRVHVPGLRGSQRAAAPAGSTARAQFEVCTSRPLPPMYPFPNTPSPFPLLKSPKNAAPLGHIPTYSRAAT

SEQ ID NO: 277083 - protein, 211 aa, Glycine max
  Clone ID: PAT_MRT3847_92228C.1.pep
HLSVTYDTPDTESDIKLLCSQVQSDLKQGIAGAVPIPSDGACKRAVIDALVTNVEAMIKADRKITALKELQGHMWRTGYENNELKGIVFDDVPEALEKWHTLGIKVYIYSSGSRLAQRLIFGHTNHGDLRKYLSGFFDTTVGNKRETRSYVEISESLGVDKPSDILFVTDVYQEATAAKAAGLEVIISVRPGNAPLPENHGFKMISSFSEI

SEQ ID NO: 277084 - protein, 101 aa, Glycine max
  Clone ID: PAT_MRT3847_92229C.1.pep
GSRLAQRLIFGHTNHGDLRKYLSGVFDTTVGENKRETRSYVEISESLGVDKPSDILFVTDVYQEATAAKAAGLEVIISVRPGNAPLPENHGFKMISSFSEI

SEQ ID NO: 277085 - protein, 69 aa, Glycine max
  Clone ID: PAT_MRT3847_9222C.1.pep
NWENPPPLGRSYVLDHLRRINDTNICKFKLSVTKALAFQGLKVVSLVGKGLNGTYAFDLLWRKKLYRKT

SEQ ID NO: 277086 - protein, 108 aa, Glycine max
  unsure (1)..(108): unsure at all Xaa locations
  Clone ID: PAT_MRT3847_92230C.1.pep
MDEILNKVGSYWFFKKGSKGFNSGGDDINLLXTSIEGGTQWVVNKVKGKMPKALXECYKEYETIHXIFPLDATHYEFNAKTRELVVYTSQVCEVGYTDSSELRVSTSV

SEQ ID NO: 277087 - protein, 65 aa, Glycine max
  Clone ID: PAT_MRT3847_92231C.1.pep
SVREKKKNLLKKKKKKGRPPLSDFVTPELNSGPCLEGFQLFLIGGRLKPGRNNGHSCSLGEMVIR

SEQ ID NO: 277088 - protein, 67 aa, Glycine max
  Clone ID: PAT_MRT3847_92232C.1.pep
LLFWNCTIHNTKSSSWLIGELLGSIQDSWLFVMTIMFFLFMVKDNSWTWRIKNETKYGTTFSSFSID

SEQ ID NO: 277089 - protein, 66 aa, Glycine max
  Clone ID: PAT_MRT3847_92233C.1.pep
NTKRNPPFVHQKKHPLIKAREGDQFELAKTPPRPKGREKKRHAAYRNSALEGPKREKGRKLLWEEK

SEQ ID NO: 277090 - protein, 47 aa, Glycine max
  Clone ID: PAT_MRT3847_92234C.1.pep
MSRQWCIISAFKVLTMDLVRVINLMIDIDGGLNVIDHSPYNCACSGR

SEQ ID NO: 277091 - protein, 161 aa, Glycine max
  Clone ID: PAT_MRT3847_92235C.1.pep
HASGSVSRIVARKTPESRCPAISLAEVPSKQARNDHEAAEKLKFVIYQRPKAFQNGSTDLGNKNGAPKTVEERIEEYNKARARIFNGSVSADSDAASVLGTLCTGRDESVNVEPSVDEIKVSTMNNRSRVAVFKDTQKDRSDPDYDRNYKGMLGAQFLTST

SEQ ID NO: 277092 - protein, 84 aa, Glycine max
  unsure (1)..(84): unsure at all Xaa locations
  Clone ID: PAT_MRT3847_92236C.1.pep
SPFSCSTSTSXSSMTWTTTLRDSKKPFTATRSMRFVVALYSVLKTVFSPSLPASXPAALTREKERRTRGDSSSSTASEFESCFG

SEQ ID NO: 277093 - protein, 65 aa, Glycine max
  Clone ID: PAT_MRT3847_92237C.1.pep
KHDSMVQAAVKTFPANFRHPDSVPPGSQKSNPFSTQLWPIFPLPWLIHNQHFIKPTTPSVVFSQP

SEQ ID NO: 277094 - protein, 35 aa, Glycine max
  Clone ID: PAT_MRT3847_92238C.1.pep
CRRLALCPPGHSRCSFGAPPGNVADAASVLTLCVA

SEQ ID NO: 277095 - protein, 411 aa, Glycine max
  unsure (1)..(411): unsure at all Xaa locations
  Clone ID: PAT_MRT3847_92239C.1.pep
MAMTTVVFVLCIFVVLNASASDATRLLLNKTATGNVSREKIERYLLENGLGQTPPMGWNSWNHFGCDINESLIRETADALVSSGLAALGYKYINLDDCWAELNRDHQGNMVPKASTFPAPIKALAHYVHGKGLKLGIYSDARNQTFKNRIPGSLLWEDSDSKTFVXWGVDYLKYDNCENNGILATERXIPMSEAFLETGLPIFFSMCEWRWQDTKDXAKTMGNNKRTSWDIEVNWNSMTSIADANDRRATYAGPGXGWNDPDMLEVGNGRMTTEEYIAHXSIWALAKAALXKGYDIQAMDNTTYELISNREVVAVNQDKLGIQGKKVKNNNGLEVWTGPLRGNKVAVILWNRSSSNATVTACWSDIGLEPGTIVDARDLWEHSTQTSVSGKISAELDSHACKMYVLTPRRY

SEQ ID NO: 277096 - protein, 121 aa, Glycine max
  unsure (1)..(121): unsure at all Xaa locations
  Clone ID: PAT_MRT3847_9223C.1.pep
WFSLERPPFFSFFFXPXASFPXXLPPEXAILFPSXALLRSPSFVQXPSFPNYXLPLXLGPSWCVLLLSLLRWAXFLXLGRSSGPGALLLLWVYSNSVGXXPAGVSSLLLPPSPXGFVWLPD

SEQ ID NO: 277097 - protein, 96 aa, Glycine max
  Clone ID: PAT_MRT3847_92240C.1.pep
MSWPNNRENQLPANKTTNLLNHLVKELLYAILDHLDKDPCARKTLCQYCKSFHALEGTHRSNLKPRQLELLPRTLHRCRLIYNLQLTLCTCVHHYT

SEQ ID NO: 277098 - protein, 42 aa, Glycine max
  Clone ID: PAT_MRT3847_92241C.1.pep
SVTGTRINPARRFGPTGIFNNHQAWDQPWIYWGGPVGGTCGG

SEQ ID NO: 277099 - protein, 57 aa, Glycine max
  Clone ID: PAT_MRT3847_92242C.1.pep
MSYALWLHIVAIFTETNAGARKIGVDAASACIVCSAIYSSCENNVVHTWVLRIKGPG

SEQ ID NO: 277100 - protein, 38 aa, Glycine max
  Clone ID: PAT_MRT3847_92243C.1.pep
VVHHIKSLDSSIRFHHNILMHLMAPHGLIDSSTDPLEG

SEQ ID NO: 277101 - protein, 56 aa, Glycine max
  Clone ID: PAT_MRT3847_92244C.1.pep
LERGDSTRRSRFIICYSDLFGWGEGLITLCFLALLSDFQKSKLLPLVVPLSGLICG

SEQ ID NO: 277102 - protein, 84 aa, Glycine max
  Clone ID: PAT_MRT3847_92245C.1.pep
TKKQASIVKEEEKEKKEEEEKKEEKEKEKKEGEESKGEDAEEGDTKTDIKRSEYWPLRSYVDYVDYPYAPQIFSDENPNACTVM

SEQ ID NO: 277103 - protein, 64 aa, Glycine max
  unsure (1)..(64): unsure at all Xaa locations
  Clone ID: PAT_MRT3847_92246C.1.pep
MASILDYFLVLSLSCSRLFFLSDXVNPIKLINLVVLPVQNDGCTGHHWVSLQKRTRLMKVRVLV

SEQ ID NO: 277104 - protein, 107 aa, Glycine max
  Clone ID: PAT_MRT3847_92247C.1.pep
SQTQVKWGAFIPVFGKTTFDLAQGSIFLTGLSVLILFLGCKRESYLKLGKEPPVVVGSYKTTPTLLGKFRRLVVPLECLGARDSEIFLFGPLAKVRKTFFLGTKTPF

SEQ ID NO: 277105 - protein, 77 aa, Glycine max
  Clone ID: PAT_MRT3847_92248C.1.pep
GREHSLQLMRVQVGMTRPRCTNVKIFSCCPRARKSQSCGGCSNVLHSRYGSVWLRFYPGLSSVHDIYERPPDSCIRD

SEQ ID NO: 277106 - protein, 76 aa, Glycine max
  unsure (1)..(76): unsure at all Xaa locations
  Clone ID: PAT_MRT3847_92249C.1.pep
VSSFKGASVKVEPDPLSFSRKNQKFFFKVSFPTQFCQTKPEFXGLVWKDGVPKVRSAIVITDLPPILKLPLGVGIT

SEQ ID NO: 277107 - protein, 82 aa, Glycine max
  Clone ID: PAT_MRT3847_9224C.1.pep
MNLECQRALSVEMNEDEMIRGLQQLGWKKVDVSFHSAFWPFFAHNNIHVKNEWFHNAGVGVIAHVAESLRQLEASSFLSASL

SEQ ID NO: 277108 - protein, 68 aa, Glycine max
  Clone ID: PAT_MRT3847_92250C.1.pep
VQGIVLYDYRHSNWAFLESSHFRCLFVFFQLDCHMLMLFQIIFFLFLFVFFFFPVKQISYNIINVCVG

SEQ ID NO: 277109 - protein, 122 aa, Glycine max
  unsure (1)..(122): unsure at all Xaa locations
  Clone ID: PAT_MRT3847_92251C.1.pep
EDDRRGESDVVFVPFFSSLRYNRFSSKTNPHEKRSMNKVLQEKLVKYVTEQEEWKRSGGKDHVIVAHHPNSMLDARMKLWPGTFILSDFGRYPTXIANVEKDVIAPYXHVVGSYDNDQSSFD

SEQ ID NO: 277110 - protein, 62 aa, Glycine max
  Clone ID: PAT_MRT3847_92252C.1.pep
WGTLSATPTLRSNRDGAPPIWLPYTRQFNRVSADWNLTLTGLSLAWKLGLWTLGKAKFKHRG

SEQ ID NO: 277111 - protein, 53 aa, Glycine max
  Clone ID: PAT_MRT3847_92253C.1.pep
LILFFFYFYLFYFIFFYIFFFIFKNFIIQEIIFQTNNVEIDIPMITHLHSNPL

SEQ ID NO: 277112 - protein, 128 aa, Glycine max
  Clone ID: PAT_MRT3847_92254C.1.pep
TVLPKEVENGAAVASVAENSEVQQKDVKNDKETEVSHRGVFLLGENRWEEPSRLVARDGVDKSKNKDMTTKCLQCRGEGRLMCTECDGSGEPNIEPQFIEWVEEGTKCPYCKGLGYTVCDLCGGKTMV

SEQ ID NO: 277113 - protein, 78 aa, Glycine max
  unsure (1)..(78): unsure at all Xaa locations
  Clone ID: PAT_MRT3847_92255C.1.pep
MGGSICLEDGSYNGDRFWAKLQSGHQLSRDGICSASCMKEAMQCPYSQKVEEGHGLYACGXQPIQNXSMGCWTHDADL

SEQ ID NO: 277114 - protein, 368 aa, Glycine max
  unsure (1)..(368): unsure at all Xaa locations
  Clone ID: PAT_MRT3847_92256C.1.pep
MSSTLLPVTATPIFTLTKTLPLPKPYLLSYKFKFNTLVRRCSLSDHEEQRWLREEQRWLRDEHRWLREEQRWARERDQLLREIADLKLQIQALERRLLTRDLSSPASISDAVANVTLLLQVLKDKNLVLESGSSLRNTEEVKQLEEVVEHVKEVVVVEESARVEKRISLRIGSEGEEVRQMQEALLKLGFYSGEEDMEYSSFSSGTERAVKTWQAALGAPEDGIMTAELLERLYLEIRNKDTGSATQDKQSTTVLPKEVENGAAVASVAENSEGQQKDVKSDKGTEVSHRGVFLLGENRWEEPSRLFTRNGVDRSKNKDVTTKCLQCRGEGRLLCXSFLEWVDEGTKCPYCEGLGYTVCDLCGGKTMV

SEQ ID NO: 277115 - protein, 59 aa, Glycine max
  Clone ID: PAT_MRT3847_92257C.1.pep
PKCLQCRGKGRLLCTECDGSGEPNIEPQFLEWVDEGTKCPYCEGLGYTVCDLCGGKTMV

SEQ ID NO: 277116 - protein, 380 aa, Glycine max
  Clone ID: PAT_MRT3847_92258C.1.pep
MSSTLLPVTATPIFTLTKTLPLPKPYLLSYKFKFNTLVRRCSLSDHEEQRWLREEQRWLRDEHRWLREEQRWARERDQLLREIADLKLQIQALERRLLTRDLSSPASISDAVANVTLLLQVLKDKNLVLESGSSLRNTEEVKQLEEVVEHVKEVVVVEESARVEKRISLRIGSEGEEVRQMQEALLKLGFYSGEEDMEYSSFSSGTERAVKTWQAALGAPEDGIMTAELLERLYLEIRNKGTGSATQDKQSTTVLPKEVENGAAVASVAENSEVQQKDVKNDKETEVSHRGVFLLGENRWEEPSRLVARDGVDKSKNKDMTTKCLQCRGEGRLMCTECDGSGEPNIEPQFIEWVEEGTKCPYCKGLGYTVCDLCGGKTMV

SEQ ID NO: 277117 - protein, 63 aa, Glycine max
  Clone ID: PAT_MRT3847_92259C.1.pep
KDVPPKCLQCRGEGRLLCTECDGSGEPNIEPQFLEWVDEGTKCPYCEGLGYTVCDLCGGKTMV

SEQ ID NO: 277118 - protein, 71 aa, Glycine max
  Clone ID: PAT_MRT3847_9225C.1.pep
GYFPVCIKHASMYLKVNCFSTVKCYKHMRIGYEHRLCSTYQNISIPSESHISQLFSYPSSPPSSECDLSVG

SEQ ID NO: 277119 - protein, 89 aa, Glycine max
  Clone ID: PAT_MRT3847_92260C.1.pep
PNTPYDLQSFKFQPIVESIVSREMTRRYMTDMITYAHTDFVIVGASSAVLSCAYEISKNPAVSVGIIEQTVSARRSAWIGGQLLSDMVV

SEQ ID NO: 277120 - protein, 58 aa, Glycine max
  Clone ID: PAT_MRT3847_92261C.1.pep
RVGCSHVRSLKLLRHCKHVQSHRRRVLCTKVCFHSRLFRLMLFTLSVFKQISVVYLEC

SEQ ID NO: 277121 - protein, 232 aa, Glycine max
  unsure (1)..(232): unsure at all Xaa locations
  Clone ID: PAT_MRT3847_92262C.1.pep
MPPFPKTFYARPPPRRTSFLVFSCLFLSLSLFVFFFAFLRPLRDPPCPNRVPRSVKVLWDHRLSGDSNNAPVETRHKVMAFVGIQTGFRSVGRRQSLRNTWFPSDPHGLQGLEEATGLAFRFVIGKTSDRSKMSALQKEVAQYDDFILLDIEEEYSKLPYKTLAFFKAAYALFEAEFYVKADDDIYLSADRLSLLLAKERSHPQTYIGCKAKGXCEFTDPKLKWYEPLSNLL

SEQ ID NO: 277122 - protein, 321 aa, Glycine max
  unsure (1)..(321): unsure at all Xaa locations
  Clone ID: PAT_MRT3847_92263C.1.pep
VHEDTLKYMNDFELYDFVADSNFDQFINLIRGENEDANCDHFGSDLINDCFVNNQQQPLSSPANPFDQNNNNNNNDAVNVYDPSSTFSSFSCFDGELKGEGEEENDGEHSSGTTTTTTKNADGKLKLKTDRSKTLISERRRRGRMKEKLYALRSLVPNITKMDKASIIGDAVSYVHDLQAQARKLKAEVAGLEASLLVSENYQGSINNPKNVQVMARNISHPNCKKIMQVEXFQVEERGYLAKIVCNKGEGVAASLYRALESLAGFNVQNSNLATVGESFLLTFTLNVKGTEQEINLPNLKLWVTGALLNQGFEFVASFPA

SEQ ID NO: 277123 - protein, 58 aa, Glycine max
  Clone ID: PAT_MRT3847_92264C.1.pep
HTNKLLLLLNVLKATHNCWSIVFRLKWHNNCSHKGHVDSSTHDIFLHSLLIRLSSKQC

SEQ ID NO: 277124 - protein, 43 aa, Glycine max
  unsure (1)..(43): unsure at all Xaa locations
  Clone ID: PAT_MRT3847_92265C.1.pep
ILLLGIXSWYDEEEAXXNSIXXVVXALDXGHVXLVKMKSXASG

SEQ ID NO: 277125 - protein, 34 aa, Glycine max
  Clone ID: PAT_MRT3847_92266C.1.pep
DFFNPQPGQGWQPLWDNPGSSPSQGISPGEISLR

SEQ ID NO: 277126 - protein, 145 aa, Glycine max
  Clone ID: PAT_MRT3847_92267C.1.pep
MHMYGYRARVFLRSISLCKSKWHNHHLHGSLIHFSQNLTSTAGREFTEFATEPSMQRQVVEALHSGDRKKASDLLSDFGSRSRHSLTADHFVHIFEYCARSPDLLFVMEILRFMELKGVSMNNICSSLMMQALCNGGYLEEVNYY

SEQ ID NO: 277127 - protein, 58 aa, Glycine max
  Clone ID: PAT_MRT3847_92268C.1.pep
FSFFLAPMIGGCDLGIKQKSGVVASCPRYNQDFKVASDPIRKSDPIDFGDFFQRVFFY

SEQ ID NO: 277128 - protein, 87 aa, Glycine max
  Clone ID: PAT_MRT3847_92269C.1.pep
GFHHAENSSYRHKLLCHRSSSNLDLPSVLTFYPTVLSATGLASVYSYGGLLLNPFTTVVNAPTSIFLVEALILGLTFASRALGNVTS

SEQ ID NO: 277129 - protein, 133 aa, Glycine max
  Clone ID: PAT_MRT3847_9226C.1.pep
KCCLWAKDAEARKHANQAGHKVPETHERVSHASNEHEPRNVSDEVQHSLGNSSSPATSPRVKIEGDQGEASNPSDKSFNTLETKQNPEASMEEKSSSEQPSDSQPKPDHHKRNQDALAAAKERFLARKKAKEQ

SEQ ID NO: 277130 - protein, 67 aa, Glycine max
  Clone ID: PAT_MRT3847_92270C.1.pep
KGPPPPVGNRNPPFFKKPKLGPCRHAKKTRLDYINPVFSQGKTKYPALYRRAPHNFLPYRGREAGTL

SEQ ID NO: 277131 - protein, 140 aa, Glycine max
  Clone ID: PAT_MRT3847_92271C.1.pep
ILHYLHPFTVNQLDSLRYQAMNIVVVRLGRAEPPLRKEVVEYMLDVDSHIWSMRRSKANFFRIVSLFSGAISMSKWLGEVQQWKNPVTTILVHVLFFILICYPELILPTMFLYMFLIGIWNFRFRPRHPSHMDTKLSWAE

SEQ ID NO: 277132 - protein, 63 aa, Glycine max
  Clone ID: PAT_MRT3847_92272C.1.pep
AHHYLSYLIVNGIVRVWGLVMQLVVCAQLISMQYLHLFRGGTGVKGLMLFYSVESSCQIFMSL

SEQ ID NO: 277133 - protein, 82 aa, Glycine max
  unsure (1)..(82): unsure at all Xaa locations
  Clone ID: PAT_MRT3847_92273C.1.pep
TCHGNLVSWKSRKQNVVAXSSVESDYHATAKNTCELVWASLVGINFRSTKHTQARXDRPDAVHIVFSSVFHEPIEHNEEDCH

SEQ ID NO: 277134 - protein, 67 aa, Glycine max
  Clone ID: PAT_MRT3847_92274C.1.pep
GIYLEDYEVQSTRLIRQWIAKALVKDKDGKTLEDVAQQYLTKLIGRSLVQVSSFSIDGVVVFLKKFS

SEQ ID NO: 277135 - protein, 111 aa, Glycine max
  unsure (1)..(111): unsure at all Xaa locations
  Clone ID: PAT_MRT3847_92275C.1.pep
KAPKKHLATRSXHVKSAPTTGGVKKPHRYRSVTVALREIRKYQKSPELLIRKLPLQRLVREITQDFNTDLRLQIHPGLALLEAADAYLVGLFEDTHLCAIHAKRVTIMPND

SEQ ID NO: 277136 - protein, 45 aa, Glycine max
  Clone ID: PAT_MRT3847_92276C.1.pep
AKVLSATALMSEGTTYGFATGHDWLWHTRPGEWVIGIKAATINNM

SEQ ID NO: 277137 - protein, 199 aa, Glycine max
  Clone ID: PAT_MRT3847_92277C.1.pep
PLDFKSTRGEFEKLAGQINTHRRNQDPSSKDMTVEEIALGFVDVANETMCRPIRQLTEMKGHETKNHSLACFGGAGPQHACAIARSLGMKEVLIHRFCGILSAYGMGLANVVEEAQEPYSAVYGVESIVEVSQREAVLLRQVKQKLQIQGFKEENISTETYLNLRYEGTDTAIMVKRQVAEDGNLCDYATEFVRLFNRN

SEQ ID NO: 277138 - protein, 85 aa, Glycine max
  Clone ID: PAT_MRT3847_92278C.1.pep
SSILVTGESSLFPGIIERLEAGIRMIRPCGAPIKVVRALDPVMYAWGGAAAFASAPQFHTQTFSRMDYFEKGEDWLRSYQIKYSL

SEQ ID NO: 277139 - protein, 29 aa, Glycine max
  Clone ID: PAT_MRT3847_92279C.1.pep
DKFLIRPLSCLKPQNVWVYSILSSGSGMN

SEQ ID NO: 277140 - protein, 316 aa, Glycine max
  Clone ID: PAT_MRT3847_9227C.1.pep
MSKYGLNLRPPKPKKQPPRPSLANPFGFNEDDENDVEREIALQASKNKRLKEVEEQQKKALEEDPSVFDYDGVYDQMKEKVARPLVQDREERKPKYIQNLIKKAKEREQYREIVYEKKIAKERSKDDHLYADKDKFITEAYRKKLAERERQMELERLRELQEERDDVTKKKDFLLDFYANLDKNVAYGAKDAEARKRENQAEHRVPETHEGVSLASNEHENCNVSEEVQHSLGNSSSPAGSPRVKLEEDQGEASNPSDRSFNPLETKPNPEASMEEKGSAELPSDSQPKPDHHKRSQDAVAAAKERFLARKKAKEQ

SEQ ID NO: 277141 - protein, 82 aa, Glycine max
  Clone ID: PAT_MRT3847_92280C.1.pep
QRVVSLPWSPSFHRHYHFENMCHFPSHFGSFQRCKACENEPRSKGPPLLTLSKGYPYYFLSRAHSNNIDTDLEGFVSKSLPR

SEQ ID NO: 277142 - protein, 298 aa, Glycine max
  unsure (1)..(298): unsure at all Xaa locations
  Clone ID: PAT_MRT3847_92281C.1.pep
MHAKTDSEVTSLAASSPTRSPPRRPLYYVQSPSRDSHDGEKTATTSFHSTPVLSPSASPPHSRHSSSTRFSKKDHSHSLKPWKQIDVIEEEGLLQGDDHHNGLPRRCYFLAFVVGFLVLFSFFSLILWGASRPMKPKINIKSIKFDHVRVQAGSDATGVATDMITLNSTLKFAYRNTGTFFGVHVTSTPVELSYSDIVIASGNMKKFYQSRRSQSVVSVAVDGXSGASISSTTGVPTLPVPLNLSFVLRSRAYVLGKLVSAKEIKTIKCFITLDLIQLNGAIKNKNAAISLKKSCTYD

SEQ ID NO: 277143 - protein, 132 aa, Glycine max
  Clone ID: PAT_MRT3847_92282C.1.pep
LIGKRIEEWESALDQYQRIPNKDIQDILKVSCDSLEEYEQKIFLDIVCCFKGYRLLEVKEILFSHHGFCPQYGIGVLIDKSLIKIDCFGNVTLHDLIEDMGKEIVRRESPEEPEYRSRLWCPEDIVQVLEEN

SEQ ID NO: 277144 - protein, 108 aa, Glycine max
  Clone ID: PAT_MRT3847_92283C.1.pep
MHAKTDSEVTSLAASSPTRSPPRRPLYYVQSPSRDSHDGEKTATTSFHSTPVLSPSASPPHSRHSSSTRFSKKDHSHSLKPWKQIDVIEEEGLLKGMIAATGFTSLLS

SEQ ID NO: 277145 - protein, 65 aa, Glycine max
  Clone ID: PAT_MRT3847_92284C.1.pep
GVKSSNDVDYRETTISGNGKLKWEHSNNQRITINLHATTRINGDLEKTRVCSVSFETIDGRSFLS

SEQ ID NO: 277146 - protein, 82 aa, Glycine max
  Clone ID: PAT_MRT3847_92285C.1.pep
RKNSPRILLPTYTHFFLIFSSYTYTYTTTYIYLYVLCFVCVLSWFFQLIQFNNYLLLMLCVILFTIKLALEVVKSSEGDSKH

SEQ ID NO: 277147 - protein, 94 aa, Glycine max
  Clone ID: PAT_MRT3847_92286C.1.pep
GLRRFGVSFAAVCLPLFLLLWLPRVRRLFFWCDPLCPYLFLVLGLFLVRCVCFCSGFVAVPGLVSPRSSRFGPLLVPSRFGVVYSGGGRPLLWF

SEQ ID NO: 277148 - protein, 140 aa, Glycine max
  Clone ID: PAT_MRT3847_92287C.1.pep
MSSAKSLQQSLLISGEKSVCEEFGPSSKGSNRLDKVSRPKLMCISTGDDKFMVRERLSSVDETAPSIISTKISSQKVLQEEKGMVLQNPAPERPAVGHLPPAFDDVIHVIRHSSYRVGSEQPGKESVENGVQNVDCRKFI

SEQ ID NO: 277149 - protein, 47 aa, Glycine max
  Clone ID: PAT_MRT3847_92288C.1.pep
CQELFPIPTMIIKPLLSIDKIISYTNNENSCDRNFMIQKCKAKMVTF

SEQ ID NO: 277150 - protein, 82 aa, Glycine max
  Clone ID: PAT_MRT3847_92289C.1.pep
DPSPHSALVLKGPGGKRIWAFLTSSPSPSTIGNPPSMITMNSLNTPKFVLQNTTMALLGKKLPLKSGSKGKVGLPPWIGMKE

SEQ ID NO: 277151 - protein, 88 aa, Glycine max
  Clone ID: PAT_MRT3847_9228C.1.pep
TKIVCCLGPLSRSWPNDQSRFCTACMSVIFFDFSHGDHKYHRETLDNLRAVMENTGILCAAMLDSNAPEIRTGFLEDGKTIQLMTSHD

SEQ ID NO: 277152 - protein, 121 aa, Glycine max
  Clone ID: PAT_MRT3847_92290C.1.pep
ASGVELRAVCPKGGMFPLRDRRVPVTRGVFQRAGARVLKKGPEKTRSLGKLWKGFFFQVWGAHYFPAKMGGGPPLGVFPFPGAWGFFWLKFPKFGPDSKDSFLGFSRVGVLGGPPPFIGVF

SEQ ID NO: 277153 - protein, 159 aa, Glycine max
  unsure (1)..(159): unsure at all Xaa locations
  Clone ID: PAT_MRT3847_92291C.1.pep
IDYKSLCRRLDRELDKLTMEYERQQKVFEDDIERLTTEAQHCILEAQQNYSDSLEKERLKYQKDYKESIKRLEEKVMENKKKYEEFCMTSTGEGXVLVEEVVILKKIPQKETFXEKVAKGKINHLKNQMAELKMLEASRESDILKLRKMLEDEAHQKEK

SEQ ID NO: 277154 - protein, 65 aa, Glycine max
  Clone ID: PAT_MRT3847_92292C.1.pep
CPLAMPLPFCRACRLKNSLLKNLGSKEYKSSVKLHSSIKKQILDTNYALEFFPPHFTLWKISRIF

SEQ ID NO: 277155 - protein, 140 aa, Glycine max
  Clone ID: PAT_MRT3847_92293C.1.pep
HASADAWGGFVKKLQLLPKGMSVPSNPLPDQSASIGNLSIGPGAKYAEIVDGSGGSALNLLLLITLAKSISSAGKVSKLSDTVLRMDYEHRNRPVQLTVNWDAVTHDKLDFYHFHWTKPEDEVLDHLEDALGIGTESDGT

SEQ ID NO: 277156 - protein, 38 aa, Glycine max
  Clone ID: PAT_MRT3847_92294C.1.pep
QASDFNCVCVTIVKSTPNYEGKVTLLMGIYYSTDKLNL

SEQ ID NO: 277157 - protein, 97 aa, Glycine max
  Clone ID: PAT_MRT3847_92295C.1.pep
AQCLKKLLKVNKEFHRWQSKGKQKNGAMGSWAIPGSKKSPGNFFPIWWSKGSTLEALPKYFPRVLFFQNFLKGSFKGPPLLELPRFPSCHYKAPEVI

SEQ ID NO: 277158 - protein, 129 aa, Glycine max
  unsure (1)..(129): unsure at all Xaa locations
  Clone ID: PAT_MRT3847_92296C.1.pep
YCELWNPACSNAMTVSFNPDPXSDTWRMQFLKQTLMPADEIISLTGWTATPMQDVQVTIDGYICSQESVPRTYCVINPQNPLAXNKCMGKLTFPXGTFRSDKRMPHSIGGGXGANNAIPMNMPNAELSM

SEQ ID NO: 277159 - protein, 86 aa, Glycine max
  Clone ID: PAT_MRT3847_92297C.1.pep
MFWRMAGLSTASPVETILDKENFTLDELLDEDEIIQECKALNSRLINFLSGRAQVEQLIRYIIEEAPEDAEKKRSFKLVAQIGDFD

SEQ ID NO: 277160 - protein, 84 aa, Glycine max
  unsure (1)..(84): unsure at all Xaa locations
  Clone ID: PAT_MRT3847_92298C.1.pep
LRRSHNSQSSSSNSSPSSSSSQSSSSSSSSSSWIHLRSVLIVVTFSFTSSWMASDRXRLKSPCQPRKRNHSFQLKQGKAWFTQV

SEQ ID NO: 277161 - protein, 66 aa, Glycine max
  Clone ID: PAT_MRT3847_92299C.1.pep
LVVELYLSGIRVVCCLFSHISVGVECTQNFPEALEDDPIVSGNPFCVASWLAMTEGLACYFPPAKL

SEQ ID NO: 277162 - protein, 123 aa, Glycine max
  Clone ID: PAT_MRT3847_9229C.1.pep
LHQLERLNQLLHKDGQVYKIQRGDKGDSMKVSYLYQLERLNGGAVVGEISRRFSTNENTLTVGCLYVVDSQTALKAKLNNHGNLGALLQHELTRKSFLTISSAFETKDLDKSPKFGFTLLLKP

SEQ ID NO: 277163 - protein, 133 aa, Glycine max
  unsure (1)..(133): unsure at all Xaa locations
  Clone ID: PAT_MRT3847_922C.1.pep
IXFXXXNNYFQASLISTDRDFRVQNSYLQQPKTQKTKNKLKPYIQIYRSCLYSSTSAESHEALAQSAEKRPYYDMIDDSLLEFGICVAVCTEIKRNPSVSAECYSNFKAKTSHFPSQQRSKALIITLQTIYKT

SEQ ID NO: 277164 - protein, 88 aa, Glycine max
  unsure (1)..(88): unsure at all Xaa locations
  Clone ID: PAT_MRT3847_92300C.1.pep
HYPMFPLQMQTGIGGQYSNEEAXAMWRLGLDSNTGAKCQTGPGACRKHIADYGLRDQCKSXFNTENQQAYVYAKPLKLAHRDGLVSDR

SEQ ID NO: 277165 - protein, 316 aa, Glycine max
  Clone ID: PAT_MRT3847_92301C.1.pep
MGRTPCCDKKGLKKGPWTAEEDEILSSYIKKNGGHGSWRSLPRMAGLLRCGKSCRLRWTNYLRPDIKRGPFTLEEEKLVIQLHGILGNRWAAIASQLPGRTDNEIKNLWNTHLKKRLKSMGLDPKTHEPLASSTYPFHKAPASVSTRHMAQWESARLEAEARLSNESSRFSHNTTNNSNSDNNKTTDSDYFLRIWNSEVGEAFRNVHHHKADDDNNNNKITTNTPTSSCHSPLSTGSSSNKCESIATNADLASNAPEIITPSSIVKQEFEWGTRGSDSSSSNDMEDSSDTALQLLLDFPINNDMSFLEGNSFVCPL

SEQ ID NO: 277166 - protein, 59 aa, Glycine max
  Clone ID: PAT_MRT3847_92302C.1.pep
NIIKILRHDIGATVHELSRDKKKDTVPWFPRTIQELDRFANQILSYGAELDADHPGYKD

SEQ ID NO: 277167 - protein, 117 aa, Glycine max
  Clone ID: PAT_MRT3847_92303C.1.pep
DVKCKLCTRRSLLYAKRVIAVGEKGSENHASDESATLTNDGNELQKTPESTGKRKISQQVTKAGSTLGLKDLFLLRRVPHISKASSNRTKCSSVFVLSAFVMVSLVVFTDIWGYLKF

SEQ ID NO: 277168 - protein, 92 aa, Glycine max
  Clone ID: PAT_MRT3847_92304C.1.pep
FFFFFFFFFFFFFFFFFFFFFFFFFFWKKNCIYNVQEQSLQTSQPCEHTYTNYVCTQIYIELSTNLSRPTCLPSIGPKKRWRQKKKNKGMIS

SEQ ID NO: 277169 - protein, 156 aa, Glycine max
  Clone ID: PAT_MRT3847_92305C.1.pep
MEPTTTLNNIINNNNTVPAGSPPPPPPPSVPQPMNMNVNMNMNVGNTEGTTPAVPTPTPAPTPAPTTMVPAVPAPTTTTPGSLDLFGKKKRGRPRKYDADGNLRVSATPPPPPGFTLSTPSSEFSSSKRGRGKHNTTFGNNNYQQLYSSFGEVFAN

SEQ ID NO: 277170 - protein, 180 aa, Glycine max
  unsure (1)..(180): unsure at all Xaa locations
  Clone ID: PAT_MRT3847_92306C.1.pep
MSASRFIKCVTVGDGAVGKTCLLISYTSNTFPTDYVPTVFDNFSANVVVNGSIVNLGLWDTAGQEDYNRLRPLSYRGADVFILAFSLISKASYENVSKKWIPELKHYAPGVPIILVGTKLDLRDDKQFCIDHPGAVPITTAQXKTQENVKAVFDAAIRVVLQPPKQKKKKGKAQKACSIL

SEQ ID NO: 277171 - protein, 197 aa, Glycine max
  Clone ID: PAT_MRT3847_92307C.1.pep
MSASRFIKCVTVGDGAVGKTCLLISYTSNTFPTDYVPTVFDNFSANVVVNGSIVNLGLWDTAGQEDYNRLRPLSYRGADVFILAFSLISKASYENVSKKWIPELKHYAPGVPIILVGTKLDLRDDKQFCIDHPGAVPITTAQGEELRKLINAPAYIECSSKTQENVKAVFDAAIRVVLQPPKQKKKKGKAQKACSIL

SEQ ID NO: 277172 - protein, 169 aa, Glycine max
  Clone ID: PAT_MRT3847_92308C.1.pep
MSASRFIKCVTVGDGAVGKTCLLISYTSNTFPTDYVPTVFDNFSANVVVNGSIVNLGLWDTAGQEDYNRLRPLSYRGADVFILAFSLISKASYENVSKKWIPELKHYAPGVPIILVGTKLDLRDDKQFCIDHPGAVPITTAQGEELRKLINAPAYIECSSKTQENVKAV

SEQ ID NO: 277173 - protein, 128 aa, Glycine max
  Clone ID: PAT_MRT3847_92309C.1.pep
WNFLQKAAASALDMGETALVSHERQHPLPKTADPRVQIAGNFAPEPVFLEHQSLPETGKIPKCIEGVYGRNGANPLYEPVDGQNIVDGDGMDNKEKIHSGAARYACRLNETERMVPEKSLGPTSVPKS

SEQ ID NO: 277174 - protein, 92 aa, Glycine max
  unsure (1)..(92): unsure at all Xaa locations
  Clone ID: PAT_MRT3847_9230C.1.pep
PXXCVXXLXXXXXXPXLXXXRXXXXXXXPXXXXPXXXXXXPXXXPXRXPXXXXXXXXXXAIXXXXPHXXXXXXAAXXTXXXPNSXXTYXXCX

SEQ ID NO: 277175 - protein, 137 aa, Glycine max
  Clone ID: PAT_MRT3847_92310C.1.pep
MMANESGELPVTPEVTESPGVEIRGHSDGKASSGTSVEKVVPNYLRASTGSCHDFCKYGRKHAFDSKERCSIPNRATRKQLHHSSEGSVGGTMMSFARLSASVDSTKPTQMSTVKLKHIGDFKTWIFDPLNLQRELP

SEQ ID NO: 277176 - protein, 229 aa, Glycine max
  Clone ID: PAT_MRT3847_92311C.1.pep
RDSSPRSRDPDADNNNNHHHHRRQPSLDDAPPKVKLMCSFGGSIQPRPHDNHLTYVSGDTKILAVDRHVKFPSLIAKLSSLANNTPSNLSFFKYQLPGEDLDALISVTNDDDLHQMMIEYDRLSRASPRPARLRLFLFPLHNNCNFAPTESKSERQWFVDALNSVHVPEDSPPPPPATANPDFLFGLDKPAAEDALAKDSECFPEDREAEPQIENENNSKQLLQRIMKI

SEQ ID NO: 277177 - protein, 95 aa, Glycine max
  Clone ID: PAT_MRT3847_92312C.1.pep
EIKALQVLGQDHLSLQKLGHPISRKVGDHSYIPLLGVKPIKQGLPPKVASPSLILTSDSSPRLLLQYGFLGHGLVTKLVYVYDLKKKKVVRTVWL

SEQ ID NO: 277178 - protein, 142 aa, Glycine max
  unsure (1)..(142): unsure at all Xaa locations
  Clone ID: PAT_MRT3847_92313C.1.pep
LARPVRKCHPPTEARRDRMRKTETKHACSGRPWFSPNRGKDLXAFSGEPTSYLTGELTSDYSCDTGGLSDDPQTLARNRELELIHSRWAMLGALGXVLPKLLTRNGVKLGKSVWIKAGCQILNEGGLDYLGNPSLVHAQSIL

SEQ ID NO: 277179 - protein, 62 aa, Glycine max
  Clone ID: PAT_MRT3847_92314C.1.pep
LSNMMAVDPSSRKSELFQAAQNGLREAGIDFKFSKLLGDGKVAASYDKSDTTEKQEDEIYSL

SEQ ID NO: 277180 - protein, 98 aa, Glycine max
  Clone ID: PAT_MRT3847_92315C.1.pep
FVSSYAVFSFVVVGRARPPFSRRSEAQNHRNPYEFRVSIPNLKLEEMNWIQRKIYLYNVTFGLYMLDWWERCTFNIVVIILMCFVLRYVTQFFKRYVW

SEQ ID NO: 277181 - protein, 100 aa, Glycine max
  Clone ID: PAT_MRT3847_92316C.1.pep
FVSFLRSVLIRCWSCSSSFCRHSRRSEAQNNRNPFEFRVSIPNLKLEEMNWIQRKIYLYNVTFGLYMLDWWERCTFNIVVIVLMCFVLRYVTQFFKRYVW

SEQ ID NO: 277182 - protein, 64 aa, Glycine max
  unsure (1)..(64): unsure at all Xaa locations
  Clone ID: PAT_MRT3847_92317C.1.pep
LICSVLFYFSSTLGLGFLNLILVVFLCVRGLFVFPTYPVAKXGLVAHKVETNCHAKLLTVYKHL

SEQ ID NO: 277183 - protein, 260 aa, Glycine max
  Clone ID: PAT_MRT3847_92318C.1.pep
MFWRNMLLFNSHVDVTVTFLLLLFLSLFGIGSSSAAPFYIDTYCPKNASYNSNVTFETNLKVLLATLVSNVSMSGFYYTFMGLGTTSVANGQFLCRGDASAATCQDCIATAAKEITRLCPNKTESIIWYDECTLYFTNHYFSRTGIEPRAMLSDDRNISASDLDSFNRTLFSLLNDLAEEAANSQSAKKFATGQSRFDGSSPQRTVYALAECAPTETSTQCEECLKNAISTLPSCCGGKQGARALLAHCDVRYRMVLFTI

SEQ ID NO: 277184 - protein, 58 aa, Glycine max
  Clone ID: PAT_MRT3847_92319C.1.pep
TIIFMHKITTSSVFFSFMENIFNSFSYSPKKRRKIFFSTQLFILSYVSKYSNPQALNQ

SEQ ID NO: 277185 - protein, 74 aa, Glycine max
  Clone ID: PAT_MRT3847_9231C.1.pep
ISFFNRVLLMIIKKTSYPTCPLNTKVDVCSLIGWLHVFLVVVGNDRHLRTLRNNASSSPFHSVTADEIQSHYVV

SEQ ID NO: 277186 - protein, 168 aa, Glycine max
  Clone ID: PAT_MRT3847_92320C.1.pep
QFVCFHRRQLEAELKLIEEETAKRVEEAIRKRVEESLKSEEVQVEIERRLEEGRKRLNDEVAAQLEKEKEAALIEAKQKEEQARKEKEDLERMLEENRRKVEEAQRREALEQQRREEERYKELEEMQRQKEEAMRKKKQEEEQERLNQIKLLGKNKSRPKLSFAFGSK

SEQ ID NO: 277187 - protein, 66 aa, Glycine max
  Clone ID: PAT_MRT3847_92321C.1.pep
SLVNGTYANQPQRTGAAPLYNVIKYKNNSHKSQSYNGGSMVPIKKYTYLYANLNLLSKLIIPSDCT

SEQ ID NO: 277188 - protein, 81 aa, Glycine max
  unsure (1)..(81): unsure at all Xaa locations
  Clone ID: PAT_MRT3847_92322C.1.pep
PPXKTPLVKPPGYNPRFGKPPYPRDPPAYDPPFFRVAKGVLTNTPKKGAPKGGITSQNIPRGALNFFFSRFCFPSPGFCPK

SEQ ID NO: 277189 - protein, 44 aa, Glycine max
  Clone ID: PAT_MRT3847_92323C.1.pep
MLAYIIVSGDNRLTEKTVFTCRDLDILGVYYTIATQLKKSLPEY

SEQ ID NO: 277190 - protein, 263 aa, Glycine max
  Clone ID: PAT_MRT3847_92324C.1.pep
MHCRFSALATLKGIKALTEVCAEDSVCQDMIVDFGILCLLRRFLLSDDYEKLAAIEAYDASSRAHEGKERISNVDGEPATPNVNDPASVRVPPTAHIRKHAARLLTILSLLPRVKKVITADETWCKWLDDCANGRIPGCSDLKMQSYARAALLNMFCNDQPNRKSESGSGGPSDGGVPNYRNSCPRYDDMIFLINSHLPHWKCPKETDQQEAFSEEISLFTSTEMGDGTESVNDSNGSISNDSTKSSPDADCPPLDIVFVHGL

SEQ ID NO: 277191 - protein, 100 aa, Glycine max
  Clone ID: PAT_MRT3847_92325C.1.pep
AYPVKWLCKNIDLVLIAKRQLLCLPFLLLVSTNYVVLSCVAGLTIVVSGLISPRKCRTWHVQKHIGVCYVIGPAFIPSVPFLSLRFENYISYCWLSLSSS

SEQ ID NO: 277192 - protein, 66 aa, Glycine max
  Clone ID: PAT_MRT3847_92326C.1.pep
KAAQDAGGDLRVYLKGLAKAENVQNYVSENPFGQRPIREANPSWVYYRRVIESLKRSQNAGSSLPL

SEQ ID NO: 277193 - protein, 138 aa, Glycine max
  unsure (1)..(138): unsure at all Xaa locations
  Clone ID: PAT_MRT3847_92327C.1.pep
VSLTLSSLQDVAASTYVEDTLAIGSFHAVAKGIXCVCSGGNSSPYPQTVINTAPWLITVSARTIDREFPSRIIMGNNQTLQGQSLYTGKDLSKFYRIVFGEDIAASDADEKSARSCNSGSLNATLAKGKAILCFQSRS

SEQ ID NO: 277194 - protein, 49 aa, Glycine max
  Clone ID: PAT_MRT3847_92328C.1.pep
KMHNKEQNQKLLSKLKDEAGQICQAPSSMTSDSQIEDLRREIFTCKSQL

SEQ ID NO: 277195 - protein, 64 aa, Glycine max
  Clone ID: PAT_MRT3847_92329C.1.pep
LARPWLIQPLVTLHTHHMMPMATPTLFINTFTNFQLTLQLLIPYFNLYCLLMWSPIMQSIVWSQ

SEQ ID NO: 277196 - protein, 40 aa, Glycine max
  Clone ID: PAT_MRT3847_9232C.1.pep
LTNLGVKRNISTKGQFSCSVAVIHSHLFPLPEFGFLAYGA

SEQ ID NO: 277197 - protein, 61 aa, Glycine max
  Clone ID: PAT_MRT3847_92330C.1.pep
FQTHPDAPSWGWAAMETGIIPGPWGFRSLYKWDVCSITGALTGCCDLVGALTGAMVGAITA

SEQ ID NO: 277198 - protein, 53 aa, Glycine max
  Clone ID: PAT_MRT3847_92331C.1.pep
AGYDIHSILRNDEYIGRPLSTLCRELLLYLQTPVVMWTTLMIILLKMEAHTVC

SEQ ID NO: 277199 - protein, 50 aa, Glycine max
  Clone ID: PAT_MRT3847_92332C.1.pep
KKKPPPLKKFFFAFLKKKGIATRAWAIPLNPYNLDPPFFRLLYPFFFPKF

SEQ ID NO: 277200 - protein, 221 aa, Glycine max
  Clone ID: PAT_MRT3847_92333C.1.pep
RPTRPISAPSKDAPMFVVGVNEHEYKPELDIISNASCTTNCLAPLAKVINDRFGIVEGLMTTVHSITATQKTVDGPSAKDWRGGRAASFNIIPSSTGAAKAVGKVLPALNGKLTGMAFRVPTVDVSVVDLTVRLEKEASYDEIKNAIKEESEGKLKGILGYTEDDVVSTDFVGDSRSSIFDAKAGIALNKNFVKLVSWYDNEWGYSSRVIDLLVFVAKKSF

SEQ ID NO: 277201 - protein, 150 aa, Glycine max
  Clone ID: PAT_MRT3847_92334C.1.pep
TVDGPSAKDWRGGRAASFNIIPSSTGAAKAVGKVLPALNGKLTGMAFRVPTVDVSVVDLTVRLEKEASYDEIKNAIKEESEGKLKGILGYTEDDVVSTDFVGDSRSSIFDAKAGIALNKNFVKLVSWYDNEWGYSSRVIDLLVFVAKKSF

SEQ ID NO: 277202 - protein, 92 aa, Glycine max
  Clone ID: PAT_MRT3847_92335C.1.pep
INTWELIERLEDTTSPFRSPKHFKSFSFDVNVNRHVDVADVDPPLIQNGNDSAKPISVSDSDDEPQENQESMDRKRFFSIEEEMISDDVVSS

SEQ ID NO: 277203 - protein, 50 aa, Glycine max
  Clone ID: PAT_MRT3847_92336C.1.pep
THTNKYSSILDFYVIKTSETTEIKTKDAIDFTGNNIIGQSHFQLTKERPV

SEQ ID NO: 277204 - protein, 189 aa, Glycine max
  Clone ID: PAT_MRT3847_92337C.1.pep
MATNLPATKSTTTTSSQEKRHRSIFEVPPNFFDSCRLLPSPHSSVSDHHSVGQTQIIETSSNDDFVLDAPQNAVVSAPRWTCNTCKTQFDSLQDQRSHFKSDIHRFNVKLTIAGKNIVKEEDFEVLTSEFVKDYDVSSISGSESDDDSETESQSQSALHDKLSESFKHKLFFRLQTGQRVSVWKCLIMN

SEQ ID NO: 277205 - protein, 118 aa, Glycine max
  Clone ID: PAT_MRT3847_92338C.1.pep
PPSPWPLPPSATAPRRSTTRSTPPPHRPRRRGKFERKKPHVNIGTIGHVDHGKTTLTATVEYETENRHYAHVDCPGHADYVKNMITGAVQMDGAILVVSGADGPMPQTKEHILLSQAS

SEQ ID NO: 277206 - protein, 242 aa, Glycine max
  unsure (1)..(242): unsure at all Xaa locations
  Clone ID: PAT_MRT3847_92339C.1.pep
HIRVKATTGDTHLGGEDFDNNMVTYCVKEFKRKNKMDISGNKRALRRLRTACEKAKRILSCSTMTTIEVDSLYDGIDFHSSISRAKFEELNKDYLNKCIEFVGKCLIDAKMDKSSVHDVVLAGGSTRIPKLQQLLSDFFDGKDLCKCINADEAVAYGAAVHAYMLNGESSEKVQNASLWEVTPLSLGLQEDXGIMKVIIPRNTSIPTKMEDVLRTHXDNQTNILIHVYEGERKRTRDNNLLG

SEQ ID NO: 277207 - protein, 45 aa, Glycine max
  Clone ID: PAT_MRT3847_9233C.1.pep
LGGSQETRRNFICLPGHIKGEDERCSPQQNHRHQRDLPILPTQLF

SEQ ID NO: 277208 - protein, 91 aa, Glycine max
  Clone ID: PAT_MRT3847_92340C.1.pep
HNTKQFTLLTTTTFPGRPLTVRAVRGKFERKKPHVNIGTIGHVDHGKTTLTAALTMALAALGNSAPKKYDEIDAAPEERARGITINTVTVE

SEQ ID NO: 277209 - protein, 54 aa, Glycine max
  Clone ID: PAT_MRT3847_92341C.1.pep
KLSIFKTKVSGRKFSFQFHHCGYQFFYSPIIIMQICQIGIIYIYKLYHRKIILS

SEQ ID NO: 277210 - protein, 480 aa, Glycine max
  Clone ID: PAT_MRT3847_92342C.1.pep
MAVSSASASSKLILFPHASSSSLISTPFRSSTNTHKLSPLSSSFLHPTTVLRRTPSSTTTTTSPRRPLTVRAARGKFERKKPHVNIGTIGHVDHGKTTLTAALTMALAALGNSAPKKYDEIDAAPEERARGITINTATVEYETENRHYAHVDCPGHADYVKNMITGAAQMDGAILVVSGADGPMPQTKEHILLAKQVGVPNMVVFLNKQDQVDDEELLQLVELEVRDLLTSYEFPGDDTPIVSGSALLALEALMANPAIKRGDNEWVDKIYKLMDEVDDYIPIPQRQTDLPFLLAVEDVFSITGRGTVATGRVERGTVKVGETVDLVGLRETRNTTVTGVEMFQKILDEALAGDNVGLLLRGVQKTDIQRGMVLAKPGTITPHTKFSAIVYVLKKEEGGRHSPFFAGYRPQFYMRTTDVTGKVTAITNDRDEESQMVMPGDRVKMVVELIVPVACEQGMRFAIREGGKTVGAGVIQSIIE

SEQ ID NO: 277211 - protein, 118 aa, Glycine max
  Clone ID: PAT_MRT3847_92343C.1.pep
HVKFGVVLYEILTGRRSLERNRPTAEQKLLDWVKQYPADTSRFVIIMDPRLRNQYSLPAARKIAKLADSCLKKNPEDRPSMSQIVESLNQALQYSDTSLDIAESSSSSSSRSKLVRKK

SEQ ID NO: 277212 - protein, 480 aa, Glycine max
  unsure (1)..(480): unsure at all Xaa locations
  Clone ID: PAT_MRT3847_92344C.1.pep
MAVSSATASSKLILFPHASSSSSLNSTPFRSSTTNTHKLTPLSSSFLHPTTVLRRTPSSTTTPRRTFTVRAARGKFERKKPHVNIGTIGHVDHGKTTLTAALTMALAALGNSAPKKYDEIDAAPEERARGITINTATVEYETENRHYAXHVDCPGHADYVKNMITGAAQMDGAILVVSGADGPMPQTKEHILLAKQVGVPNMVVFLNKQDQVDDEELLQLVELEVRDLLSSYEFPGDDTPIVSGSALLALEALMANPAIKRGDNEWVDKIFQLMDEVDNYIPIPQRQTDLPFLLAVEDVFSITGRGTVATGRVERGTIKVGETVDLVGLRETRNTTVTGVEMFQKILDEALAGDNVGLLLRGVQKTDIQRGMVLAKPGTITPHTKFSAIVYVLKKEEGGRHSPFFAGYRPQFYMRTTDVTGKVTSIMNDKDEESTMVLPGDRVKMVVELIVPVACEQGMRFAIREGGKTVGAGVIQSIIE

SEQ ID NO: 277213 - protein, 130 aa, Glycine max
  Clone ID: PAT_MRT3847_92345C.1.pep
GTKKSQFFFFFFSTGLLDKKNFFFLGSGGPNPPKEIFEKRKKKKGCPKKNGPPPSLPWESPKWEISFGGPPPLGKGKIPWGETTAPLFPLAQSFYTPYQNGSPPGTPKGFSRPPPIFCGPSWLGLLGPGG

SEQ ID NO: 277214 - protein, 49 aa, Glycine max
  Clone ID: PAT_MRT3847_92346C.1.pep
LSMISAKDMRKWKLFCKMDGCAGDALYGDPCHPRGATTHVHKDSGDNPT

SEQ ID NO: 277215 - protein, 70 aa, Glycine max
  Clone ID: PAT_MRT3847_92347C.1.pep
PLFELEMLPSYPEMRHTILKRPDGCRLFAPLALPRDTPLLVLMLRPRRQSPQPEGASRPRGRTCRAHLEP

SEQ ID NO: 277216 - protein, 473 aa, Glycine max
  Clone ID: PAT_MRT3847_92348C.1.pep
MATRKLIRDLLLSKRSLLHHQGWSRSRRLPLVWEDRRRYSVFNEFSKNIKGQAVRNQEFQQSVKELKEKADELKGVKEELKERTKQKTEKLYKQVDEAWTEAEAAAKKVSYNVKEKISAASEEVKETFGIGKQDSSGSTDSSTKQGADANGGNQTSREEEKNQQSGSSKDADSLFGKFKSTISPPNVSAAFQKLKDAKLVDITKKGYDIVKEELSSTPTKRKRVPFASSGETSTRTDLVVMPSKQSWWSKKFDEFREKVKGHPVSKRFLKYSDPVKTKGQEIVEDLRERYETSDSPIIHKIQDINDSMFQETDAAISYKEIRQRDPYFSLPEFVGEVQEAIKPVLNAYIKGDVETLKKYCSPELIERCKAEHNAYQSHGIFFDNKILHVSDLEIRETKMMGSSPVIIVMFQTQQIYCVRDRNGAITEGGKDTIHTVFYFWALQQMDQEDRGEDGIYLMWRLREMQQQGIQALI

SEQ ID NO: 277217 - protein, 79 aa, Glycine max
  Clone ID: PAT_MRT3847_92349C.1.pep
SMSTTGSTTSEASINESKVIHISEQYDDLIRRMPMLVSRHRSIFYNTCIVVSSPHCTYTTLTWNFRFAPLFNSDYIHWI

SEQ ID NO: 277218 - protein, 88 aa, Glycine max
  Clone ID: PAT_MRT3847_9234C.1.pep
KNRGLKQLFWAFPPQNNGLIFWGPNFIKRGGVNWAYRKTWPIPNYQGNWCLFRKKGGGQINLGWDNLLQNPKIFLTGNFGHGEALNPI

SEQ ID NO: 277219 - protein, 40 aa, Glycine max
  Clone ID: PAT_MRT3847_92350C.1.pep
PNQTGLKESYFIPRRKIAFLITRERTLLNNLRYIPQQSKN

SEQ ID NO: 277220 - protein, 74 aa, Glycine max
  Clone ID: PAT_MRT3847_92351C.1.pep
VCRGKVDVLYRVCPTCKVWHIFLADLLQVIVMWHKKDVSVFMYLVIGLRMMSGRFYNDTTYGVQVLFFKKKRKP

SEQ ID NO: 277221 - protein, 80 aa, Glycine max
  Clone ID: PAT_MRT3847_92352C.1.pep
LGNGSVRYGKEEWLRGWGFVGWFDKSGKSMRLNVSHCCSGEAEINSNYTSQSFGGNESRLRWCRRRRHWLRCWCCRRSRN

SEQ ID NO: 277222 - protein, 42 aa, Glycine max
  Clone ID: PAT_MRT3847_92353C.1.pep
SKLSRTGIAVHGKESRHTRHTDCIIPRVHDVSPQPWSGQKPP

SEQ ID NO: 277223 - protein, 45 aa, Glycine max
  Clone ID: PAT_MRT3847_92354C.1.pep
ILSSNPHLSNPHPNNTNQPHSPKINHRLLSHRRNHRIAASPTVGI

SEQ ID NO: 277224 - protein, 27 aa, Glycine max
  Clone ID: PAT_MRT3847_92355C.1.pep
YSRLGLTNSKLGFAKVETGLLEGQNSH

SEQ ID NO: 277225 - protein, 70 aa, Glycine max
  Clone ID: PAT_MRT3847_92356C.1.pep
EIKLRITLYHVRLIASTKLMIRGMHCSLHDRCACVTLMYILDCISPTFCQSCMLSKSTHSRRIRIRSYGS

SEQ ID NO: 277226 - protein, 446 aa, Glycine max
  Clone ID: PAT_MRT3847_92357C.1.pep
MREILHIQGGQCGNQIGAKFWEVICDEHGIDHTGKYSGDSELQLERINVYYNEASGGRYVPRAVLMDLEPGTMDSVRSGPYGQIFRPDNFVFGQSGAGNNWAKGHYTEGAELIDSVLDVVRKEAENCDCLQGFQVCHSLGGGTGSGMGTLLISKIREEYPDRMMLTFSVFPSPKVSDTVVEPYNATLSVHQLVENADECMVLDNEALYDICFRTLKLATPTFGDLNHLISATMSGVTCCLRFPGQLNSDLRKLAVNLIPFPRLHFFMVGFAPLTSRGSQQYRALTVPELTQQMWDAKNMMCAADPRHGRYLTASAMFRGKMSTKEVDEQMINVQNKNSSYFVEWIPNNVKSSVCDIPPKGLKMASTFIGNSTSIQEMFRRVSEQFTAMFRRKAFLHWYTGEGMDEMEFTEAESNMNDLVAEYQQYQDATADEDEYEEEEEEEEIAA

SEQ ID NO: 277227 - protein, 36 aa, Glycine max
  Clone ID: PAT_MRT3847_92358C.1.pep
ERLGWSAIGTLVIGHVLSPVSSLRWIQFRSHRTRER

SEQ ID NO: 277228 - protein, 446 aa, Glycine max
  Clone ID: PAT_MRT3847_92359C.1.pep
MREILHIQGGQCGNQIGAKFWEVICDEHGIDHTGKYSGDSELQLERINVYYNEASGGRYVPRAVLMDLEPGTMDSVRSGPYGQIFRPDNFVFGQSGAGNNWAKGHYTEGAELIDSVLDVVRKEAENCDCLQGFQVCHSLGGGTGSGMGTLLISKIREEYPDRMMLTFSVFPSPKVSDTVVEPYNATLSVHQLVENADECMVLDNEALYDICFRTLKLATPTFGDLNHLISATMSGVTCCLRFPGQLNSDLRKLAVNLIPFPRLHFFMVGFAPLTSRGSQQYRALTVPELTQQMWDAKNMMCAADPRHGRYLTASAMFRGKMSTKEVDEQMINVQNKNSSYFVEWIPNNVKSSVCDIPPKGLKMASTFIGNSTSIQEMFRRVSEQFTAMFRRKAFLHWYTGEGMDEMEFTEAESNMNDLVAEYQQYQDATADEEEYEEEEEEEEIGA

SEQ ID NO: 277229 - protein, 95 aa, Glycine max
  Clone ID: PAT_MRT3847_9235C.1.pep
NMRRANYFTVNNYNSIIYSTNSLTLIHKPRELRSCSIRERSPIYPTIKFEQLELCLFSLDSPQTFKSCILLAKAMAIHSGCTADHCSWLISQPAE

SEQ ID NO: 277230 - protein, 302 aa, Glycine max
  Clone ID: PAT_MRT3847_92360C.1.pep
MGLPNVSEDLSSEMEVDAFRRLFPLRYFERHLAESIRPDGRPLGKARETSIFLGAVASANGSALVKIGSTTILTAIKMEVMTPSLESPDEGCLAIDFHMPPICSPIVRPGRPAEASPVVSKQLSDTISSSKMIDLKELSLVSGKAAWMAYLDIYCLDADGALFDAALLSAVASLSHLQIPVVAMNDDGKIVLVSEEDGQKREQEPVNKEKRKLTLRSIPFSLTCILHKNYILADPTAEEESIMETHVTVVLDTSGQLISLYKPGGPVLAYTSAIQDCAALTRQRVKELKSFLDKANSAMEVE

SEQ ID NO: 277231 - protein, 307 aa, Glycine max
  Clone ID: PAT_MRT3847_92361C.1.pep
MGLSNASEDLSSEMEVDAFRRLFPLRYFERHLAESIRPDGRPLGKARETSIFLGAVASANGSALVKIGSTTMLTAIKMEVMTPSLESPDEGCLAIDFHMPPICSPIVRPGRPAEASPVVSKQLSDTISSSRMIDLKELSLVGGKAAWMAYLNAAFSIMQDIYCLDADGALFDAALISAVAALSHLQIPAVAMNDDGKIVLVSGEDGQKPVNKEKRKLTLRSIPFSLTCILHKNYILADPTAEEESIMETHVTIVLDTSGQLISLYKPGGPALAYTSAIQDCVGLTGQRVKELKSYLDKENSAMEVVV

SEQ ID NO: 277232 - protein, 48 aa, Glycine max
  Clone ID: PAT_MRT3847_92362C.1.pep
VRSPGLMLGMRGWHRGIKHLRRMRELEVEPIDIANVNQALSGLVWSLE

SEQ ID NO: 277233 - protein, 65 aa, Glycine max
  Clone ID: PAT_MRT3847_92363C.1.pep
IQSIPFLGGSALKIWHKGGGQGAQFFSSLSGKGFKGKEILVGLERNRLRGAPAVKTRGGAFEPPK

SEQ ID NO: 277234 - protein, 81 aa, Glycine max
  Clone ID: PAT_MRT3847_92364C.1.pep
STYTIIYVYYDVGYLYFAIASARDAVSVTWNIVHEGGRTLISYFICVLFVIVTFVRYGDPGHLLGHIVVLALFAWTHSFAA

SEQ ID NO: 277235 - protein, 76 aa, Glycine max
  Clone ID: PAT_MRT3847_92365C.1.pep
PTNRSERNHPVMCQQPLPQCACNRPVCQCYSGPLGYHSTLRRLSRTIRLCHIRWLPVMRPRVHPPSPRWLSFSLCL

SEQ ID NO: 277236 - protein, 64 aa, Glycine max
  Clone ID: PAT_MRT3847_92366C.1.pep
PVFLLCILQGDCISWESHFWYLNHSKAQGLQSLLEYVNLSFVTVRRIWILDPSKGDSNLDSFMA

SEQ ID NO: 277237 - protein, 33 aa, Glycine max
  Clone ID: PAT_MRT3847_92367C.1.pep
NKKTSPLTQRTKLVPSPVKNWGGSRTKAHTTYP

SEQ ID NO: 277238 - protein, 92 aa, Glycine max
  unsure (1)..(92): unsure at all Xaa locations
  Clone ID: PAT_MRT3847_92368C.1.pep
MQRPPPEDFLLKETKPHLGGGKVSGDKLTSTYDLVEQMQYLYVRVVKAKDLPAKDVTGSCDPYTEVKLGNYKGTTXHFDKKSNPEWNQVFAF

SEQ ID NO: 277239 - protein, 77 aa, Glycine max
  unsure (1)..(77): unsure at all Xaa locations
  Clone ID: PAT_MRT3847_92369C.1.pep
YKPHLPIVNLYKIFYSKPCSLSFPLYSPLIIXKPYYHFINPLILKLILFYIKXSIQILFPNXLYQKIISQLYKPSIY

SEQ ID NO: 277240 - protein, 78 aa, Glycine max
  Clone ID: PAT_MRT3847_9236C.1.pep
GRTKIALILRLEFGIDHKIGLEMIYLPKSNTDPINHTNKTRTQIKNSIQSRIKEKNPSPYTRVPATATYTTFHQLYVF

SEQ ID NO: 277241 - protein, 187 aa, Glycine max
  Clone ID: PAT_MRT3847_92370C.1.pep
MQRPPPEDFLLKETKPHLGGGKVSGDKLTSTYDLVEQMQYLYVRVVKAKDLPAKDVTGSCDPYTEVKLGNYKGTTRHFDKKSNPEWNQVFAFSKDRIQASILEVTVKDKDVVKDDFIGRVLFDLNEIPKRVPPDSPLAPQWYRLEDRKGDKAKGELMLAVWMGTQADEAFSEAWHSDAATVSGTDAL

SEQ ID NO: 277242 - protein, 137 aa, Glycine max
  unsure (1)..(137): unsure at all Xaa locations
  Clone ID: PAT_MRT3847_92371C.1.pep
MQRPPPEDFLLKETKPHLGGGKVSGDKLTSTYDLVEQMQYLYVRVVKAKDLPAKDVTGSCDPYTEVKLGNYKGTTRHFEKKSNPEWNQVFAFSKDRIQAXILEXTVKDKDVVKDDFIGRVLFDLMRSRACSPAGLGT

SEQ ID NO: 277243 - protein, 92 aa, Glycine max
  Clone ID: PAT_MRT3847_92372C.1.pep
IFKNRGYAIYLFPGKHSLMSPKTGFKSKNPDGTCSESARKKWPGGGKGGCVLWQAHWRAWKPWGAILGTEAQTLSMFSFSHLYWEPTPPLLF

SEQ ID NO: 277244 - protein, 170 aa, Glycine max
  unsure (1)..(170): unsure at all Xaa locations
  Clone ID: PAT_MRT3847_92373C.1.pep
MQRPPPEDFLLKETKPHLGGGKVSGDKLTSTYDLVEQMQYLYVRVVKASFLPAKDVTGSCDPYTEVTLGNYISTTKNIDSQGNGEWXGVFPFSKAPIHPSILAVFFVSPTTACLELVYACDATPMLPQTLAVLTMLPLLAGIITLAACFVPRKTPNRLTLINSSKFEFVL

SEQ ID NO: 277245 - protein, 137 aa, Glycine max
  Clone ID: PAT_MRT3847_92374C.1.pep
VWRSCRLLGAQERFQSSYLSSIARRARDADEASEVAYLKELYHQNDPEAVIRVFESQPSLHNSPSALSEYVKALVKVDRLDESQLLKTLRRGMSNSVSEEETLAGLSALRNTRKSEKDNTIGTASNPIYMVARDGGN

SEQ ID NO: 277246 - protein, 78 aa, Glycine max
  Clone ID: PAT_MRT3847_92375C.1.pep
FLVLVTHIHYFTLCLSSIKSTNVVTRHVYILMPNHIFIHSHRPHVLFGWLVQFSQLPTDSSISPSEGCAPPLSVNASD

SEQ ID NO: 277247 - protein, 241 aa, Glycine max
  unsure (1)..(241): unsure at all Xaa locations
  Clone ID: PAT_MRT3847_92376C.1.pep
FPWQCCSWRLLGAHEGFHSSYLSSMARRARDADEAAEVAYLKELYHQNDPEAVIRVFESQPSLQSSPSALSEXVKALVKVDRLDESXLLNTLRRGMTKSENEEKSLXCLSTLRNKGKSKKDNTIGTASNPIDMAFFKISGVGALIEDKGISXTVSFFMISGVGALIEDKGISKGLGISEEVQPSMESSTKFSDVKGVXDEAKEELEEIVHYFRDPKRFTRLXGGKLPKGVLLXVGPPGTGK

SEQ ID NO: 277248 - protein, 169 aa, Glycine max
  unsure (1)..(169): unsure at all Xaa locations
  Clone ID: PAT_MRT3847_92377C.1.pep
MEARTKMSEVLPFIVMVIMEGWTIGLTIFAKTAITNGMSPFVFIVYTNALATIILFPCFFLPHQEDRKERPSFTFSLFMRFLFLGFIGMTMTQAFLFLGLSYSSPILVCAMSHLIPTFNFLLSLILRKTELNLRSPGIQVQVIGILVSIMGSSVXEFCNGPLVRPCSDH

SEQ ID NO: 277249 - protein, 57 aa, Glycine max
  Clone ID: PAT_MRT3847_92378C.1.pep
DPFKSFIFSTNTFHLHKHEYQQHILKTGIYMLIITKPCWLTMLLGSNSLHLVFFRQC

SEQ ID NO: 277250 - protein, 83 aa, Glycine max
  Clone ID: PAT_MRT3847_92379C.1.pep
SDPSAATYLSNRAAAYMSSGDFTSALADCKAADSLDPRNEKTLLRMARIHTSLGDPDAALKIFDTLPSDLAAKDRLPATNMQN

SEQ ID NO: 277251 - protein, 108 aa, Glycine max
  Clone ID: PAT_MRT3847_9237C.1.pep
LPSDGQRIVYEGSVHYAQALYEGRTLPCIQTTYLHVSWGLGSQTHELTREIFCCETESLLKTFHYYYADDPVHYPRDLCLFEKPTWVTLQRDYKSYIDKWLEPLCRCL

SEQ ID NO: 277252 - protein, 103 aa, Glycine max
  Clone ID: PAT_MRT3847_92380C.1.pep
APERIQTGHGKPTRSFPFPKCFFHDPGFSKALWFQDCKDSSVNSEGAGVRIGHQDWSPLRRPNSPSFSPPQQGTRTAAPCSSYLLTPHVDTLHSAWPFPEPKE

SEQ ID NO: 277253 - protein, 74 aa, Glycine max
  Clone ID: PAT_MRT3847_92381C.1.pep
ELIRTALFYYVILERKIQRRNERFERDPVSETEILIMSIELLQLSENTEIYMCVGVQGVRLPRTNFQLTDCCQS

SEQ ID NO: 277254 - protein, 57 aa, Glycine max
  Clone ID: PAT_MRT3847_92382C.1.pep
KMFKQMEDNKKKKIDIFLLQKLNFQNSRSYLLLKSINLIIFLPLKKDYLKHFRNFNN

SEQ ID NO: 277255 - protein, 57 aa, Glycine max
  Clone ID: PAT_MRT3847_92383C.1.pep
LFCFFSERKRNFQISFHMRPHPKPIVDYQMDMFTHNIMWTQLTMVIQLHCSIKKTER

SEQ ID NO: 277256 - protein, 50 aa, Glycine max
  Clone ID: PAT_MRT3847_92384C.1.pep
YKSIGNQIILNHRIQIVNYKILITMGGQSLTRLPRSAGSNRGQVMQFSAL

SEQ ID NO: 277257 - protein, 83 aa, Glycine max
  Clone ID: PAT_MRT3847_92385C.1.pep
TTRNCNVPFLKPTPAKTKAGMHGLKLNHPRRRKLKANYIFHKIDYTKLLRITTTSDYYLSLILFNLHKTFKSGFIINLATFTT

SEQ ID NO: 277258 - protein, 98 aa, Glycine max
  unsure (1)..(98): unsure at all Xaa locations
  Clone ID: PAT_MRT3847_92386C.1.pep
PXTQQRFWPLALFAPLTKSFFCGPCFPLWLKKLLLLLLFLLGKIIKTRGFIYGLEICFPGVLPLGFGGGVFFLLFLGGVVEGFQFFFFFNIPVSPVLV

SEQ ID NO: 277259 - protein, 55 aa, Glycine max
  Clone ID: PAT_MRT3847_92387C.1.pep
KKQEIEFPTAGLGSVPGDGEGGIEMTESMQLIREFCDRFISSEKATRTRIVIFLI

SEQ ID NO: 277260 - protein, 163 aa, Glycine max
  Clone ID: PAT_MRT3847_92388C.1.pep
ARGGEEDGCADGVRLVQLLIACAEAVACRDKSHASILLSELKANALVFGSSFQRVASCFVQGLIERLNLIQPIGPAGPMMPSMMNIMDVASDEMEEAFRLVYELCPHIQFGHYLANSTILEAFEGESFVHVVDLGMSLGLRHGHQWRGLIQNLAGRVSGERVR

SEQ ID NO: 277261 - protein, 141 aa, Glycine max
  Clone ID: PAT_MRT3847_92389C.1.pep
TVGYIAPEVWNRNFGGVSYKSDVYSYGMMILEMVGGRQSISIEASHSSETYFPDWIYKHVELGSNLAWDEGMTTDENEICKKMIIVGLWCIQTIPSDRPAMSKVVEMLEGSIDQLQIPPKPFIFSPTKTQVDICTTTSSSD

SEQ ID NO: 277262 - protein, 78 aa, Glycine max
  Clone ID: PAT_MRT3847_9238C.1.pep
MGEPTTQEIIDIANNFLLSSPPGEFMEVVTDVRALLPNESMINESAPRTFREYNTVHIIKAYCSRHFNVHILASWKKE

SEQ ID NO: 277263 - protein, 66 aa, Glycine max
  Clone ID: PAT_MRT3847_92390C.1.pep
LLFHSGYTSVLIKPLLFHSQPRCYPPACVLAKNLPCSIPNCRLSCLISSNACCMSLTSVYNHAQLC

SEQ ID NO: 277264 - protein, 41 aa, Glycine max
  Clone ID: PAT_MRT3847_92391C.1.pep
FCILDRISIPFTLLLTILIHLLNAINHQLNLKVNLRPNSDK

SEQ ID NO: 277265 - protein, 44 aa, Glycine max
  Clone ID: PAT_MRT3847_92392C.1.pep
PTRSDTHRITPVSQIQPYGTTWNTDLVIYIATYFQFHLHHSKSI

SEQ ID NO: 277266 - protein, 113 aa, Glycine max
  Clone ID: PAT_MRT3847_92393C.1.pep
CPTKGAKRKPPFPPILQVFFSSFLQFFYPVSPPVSPPEKGPLFPPPLTPLCSPLWPPLVFPLRFWGEICFDPGLGKPFFPGHIFFMFFSSFFLAPFWPTRVPPGNPPGFPGLP

SEQ ID NO: 277267 - protein, 161 aa, Glycine max
  Clone ID: PAT_MRT3847_92394C.1.pep
GWSSSRGCEKTTEGYIMKSNEEGTFSNGDLVPFGTVQIEPHSTVLNYGQGLFEGMKAYRRADGEVQIFRPEQNAMRMQMGAERLLMVAPSVEQYVDAVKQVVHANKRWVPPHGKGALYIRPLLFGSGSGMGIAPAPHCTFLIYTNPISNAYKGRHTNSTLS

SEQ ID NO: 277268 - protein, 88 aa, Glycine max
  Clone ID: PAT_MRT3847_92395C.1.pep
SDWCINAKVRLWKPMVVDMDQQERKEAVGAVDEREGNQSSSNNSGHQLAQTPRPSTTASTATAPPPATTTPPTGKRSDSESDPSLAPL

SEQ ID NO: 277269 - protein, 259 aa, Glycine max
  Clone ID: PAT_MRT3847_92396C.1.pep
TRPVPPFWSEKEQGIFDAILRGHIDFASDPWPSISSSAKDLVKKMLRADPKQRLSAVEVLNHPWMREDGASDKPLDVAVLSRMKQFRAMNKLKKVALKVIAENLSEEEIIGLKEMFKSMDTDNSGTITFEELKAGLRELGTKLSESEVRQLMEAADVDGNGTIDYIEFITATMHMNRMEREDHLYKAFEYFDNDKSGYITMEELESALKKYNMGDEKTIKEIIAEVDTDNDGRINYDEFVAMMRKGNPDITHITQRRRK

SEQ ID NO: 277270 - protein, 88 aa, Glycine max
  unsure (1)..(88): unsure at all Xaa locations
  Clone ID: PAT_MRT3847_92397C.1.pep
LVTSTLLFLSFTLSCAIYTSTITNYTNNKVMTIYKEXLVNHQKVYNKLREKDKKFQMFKYNLGLMQEHNIDHNGTYKLKLNQFANMTK

SEQ ID NO: 277271 - protein, 63 aa, Glycine max
  Clone ID: PAT_MRT3847_92398C.1.pep
YGIVAIFAWSCWSAAAQNQRSSDRAIEIGLCFLVTVKWLKLIMISIRLGNYSTVIEIRSVKNN

SEQ ID NO: 277272 - protein, 136 aa, Glycine max
  Clone ID: PAT_MRT3847_92399C.1.pep
MATISAAITTPSITRACLVQKRSLGFSSPVLGLPAMGKVGRVSCSMEEKPSSVKESSSSMLGMGASLMAAASAAAMSGPAMALVDERLSTEGTGLPFGLSNNLLGWILFGVFGLIWALYFVYTSSLEEDEESGLSL

SEQ ID NO: 277273 - protein, 68 aa, Glycine max
  Clone ID: PAT_MRT3847_9239C.1.pep
FHPLLVLVYCAHTQGFCQLSSAQFWNVGSILRTLSYPHCVDFLAGVVWGLQPPFVTDQESCSSRRTHR

SEQ ID NO: 277274 - protein, 106 aa, Glycine max
  Clone ID: PAT_MRT3847_923C.1.pep
MIMGFLHKLWDETLAGPAPETGLGKLRKYNSFSGGSSVRSTVAEHVPISRSITIVRSQSGFGTTTTTSAPSAPTTPRTPLTPEAPGGDFKKLTRRKSSTVESADNT

SEQ ID NO: 277275 - protein, 221 aa, Glycine max
  Clone ID: PAT_MRT3847_92400C.1.pep
GANVLTYTLRISKEEISCINHTLKRLSSLYLRVESILKESSALPSNFLVELGKVLSSTSINGASCSPLQFEACLKFFSLKQFVFHGPIKHVKAELSVPNIDFEHPLPFVSGLPVGIQCEITLHNILSESRLWLRMTLDDGFIQYFFLDLDCSEGSEEVRKCTFVAPFYRTAEADCLILKVCIGSECLFENVSPVQRFGGPKRELVLLCNEKQVYLSKVSKA

SEQ ID NO: 277276 - protein, 87 aa, Glycine max
  Clone ID: PAT_MRT3847_92401C.1.pep
FSPCDSRHSPPHSSRSTTHTFHSQPHPPPSPFPSGSENTHNPQPNAPQWTPPHPNNNNNNPLHPLLTSPPSPSESLLFPHTNTLTLT

SEQ ID NO: 277277 - protein, 78 aa, Glycine max
  unsure (1)..(78): unsure at all Xaa locations
  Clone ID: PAT_MRT3847_92402C.1.pep
HIYSASKQISAAISPDQNTTAFKDVAILRHPRVGEYTYGHFTXTVTLQQDHGDEALRGVLVPTHHLSIGDIFMVNSRD

SEQ ID NO: 277278 - protein, 129 aa, Glycine max
  unsure (1)..(129): unsure at all Xaa locations
  Clone ID: PAT_MRT3847_92403C.1.pep
MHIFVKTLTVKTITLEVESSDTIDNVMAXIHDXERIPPDHQRFILTVXHLDDGRTFADYYIQKESSLDLVLRLLGGMHTFGKTLTGKTITLEAESYDTIDDVKAMIQDKGGIPPDQQRLIFAGKQLEDG

SEQ ID NO: 277279 - protein, 77 aa, Glycine max
  Clone ID: PAT_MRT3847_92404C.1.pep
LTFSGSCKQTRAHSSFLLIMLQKVLRTAPTNKETRLVDNNCFCYVHSFTELLLYTMLVTIAVYFLHQNDVKSDLVSV

SEQ ID NO: 277280 - protein, 63 aa, Glycine max
  Clone ID: PAT_MRT3847_92405C.1.pep
MSILSSMDMPTIDVDLGPEKLEDEKQGGPLLHCDLCDTEVVHKLAQMFLPGLASACVDNTSGD

SEQ ID NO: 277281 - protein, 166 aa, Glycine max
  Clone ID: PAT_MRT3847_92406C.1.pep
GSQKSSFQSFLLSWKIMVLATSALFLHTAKSPIYHAILFYASLKKPFPDVLHQKARFSDLIRLLTLTQLSSSVSGQLAALWSGVVSDPTSFMHHSTTSFWSLHERHLFFFPPQHLYIVFSLFFVSFCFCFLMWQCCLTCSVFSRCFPTFERGHYFDFFSLMFLGIC

SEQ ID NO: 277282 - protein, 56 aa, Glycine max
  Clone ID: PAT_MRT3847_92407C.1.pep
SLKPFYGKGKVFLTKPQITWPPFLGPFLHLQIKNFKYRNFWLWGELCFWRARVPQI

SEQ ID NO: 277283 - protein, 62 aa, Glycine max
  Clone ID: PAT_MRT3847_92408C.1.pep
QCPCWEADRQGYIYQVMGLELKENWILWKQLTWKAHNEFVEDENAWGLNCLGGNNGCNRMEN

SEQ ID NO: 277284 - protein, 71 aa, Glycine max
  unsure (1)..(71): unsure at all Xaa locations
  Clone ID: PAT_MRT3847_92409C.1.pep
MFPLVKSALNRLQVXRSIQATHGHAESQKSTPEFYDKYGNAVLATGANCCIVTWTYVVPQVGPRWRLSPVG

SEQ ID NO: 277285 - protein, 56 aa, Glycine max
  Clone ID: PAT_MRT3847_9240C.1.pep
LTRNSNGHNFSHGCSTQAHHISRRSKLNNGRSREIKMVITFHTEVRFSCIVYRDVG

SEQ ID NO: 277286 - protein, 123 aa, Glycine max
  unsure (1)..(123): unsure at all Xaa locations
  Clone ID: PAT_MRT3847_92410C.1.pep
SLQGPLVHQWQLLVPNWGCSTEILNVHATNRQLHADEALEVIAMTTPDYSGADLANLXNETAILASRQLXTTILYKEIDDYIDTNVARMERTTMTDXKSRSLLAYHELHHAICETMTADHDAV

SEQ ID NO: 277287 - protein, 85 aa, Glycine max
  Clone ID: PAT_MRT3847_92411C.1.pep
IKDRIRYSVVIIQSTKKKQVDRVADLVHVECNRLNKPKYKNNRQKTSRNTTKANGCNYDSRGGDEGEKDEGFAVSGYMLARRMDN

SEQ ID NO: 277288 - protein, 48 aa, Glycine max
  Clone ID: PAT_MRT3847_92412C.1.pep
LTLTNLTIPQLPTKDMHILMFIDHSGLKTTIVHIHSLRYIDTTIPTIA

SEQ ID NO: 277289 - protein, 109 aa, Glycine max
  Clone ID: PAT_MRT3847_92413C.1.pep
FPLFKKKPPKNFFGPKKGKKNPLTFCPFKNFKQISPWGTFGGLLKSLKGKTRGPFHHLKNWQPPPKAKALKYSLFGPKQVGREFFPPHFSFLGFWNPFNKKRKMGFFFF

SEQ ID NO: 277290 - protein, 100 aa, Glycine max
  Clone ID: PAT_MRT3847_92414C.1.pep
TMLFQYLCIYYFTSYVNIVFNFMVVSLHMKVVIALWLVNQCSAMINSTRSKWLLEEHGHIKAEMTQELETLDISFGWPNIFQLVKDMCVFCETFWLQSDV

SEQ ID NO: 277291 - protein, 74 aa, Glycine max
  unsure (1)..(74): unsure at all Xaa locations
  Clone ID: PAT_MRT3847_92415C.1.pep
AQXXPREXXRHTTXTHTXETREIXMASXXXGFXXTXXXSCRTNXRGHXTQXTLXXXKXNTXRDXTQPTDXQQHT

SEQ ID NO: 277292 - protein, 66 aa, Glycine max
  Clone ID: PAT_MRT3847_92416C.1.pep
LASGGFEKNLLGVQPVKGYYFSFPGVQPYLDLSHLPILFFDPVKTYSRFKKKPDPFKKPLFLTFCN

SEQ ID NO: 277293 - protein, 58 aa, Glycine max
  Clone ID: PAT_MRT3847_92417C.1.pep
DHPPWELFFPKKEGGHKNVLKRGGQRGENQTSGNLGFFFNKPNQSPVFFFFLGFFQIF

SEQ ID NO: 277294 - protein, 107 aa, Glycine max
  unsure (1)..(107): unsure at all Xaa locations
  Clone ID: PAT_MRT3847_92418C.1.pep
NSMEHLIRLLSPSSSIHNNLKKCNLIHLDCSEITGFTVYKYKXVMNLVNRTDHARFRRCTSHAQAQGQTNPEPQPQMQQQGFMGDFEKPTILNSEPINKDEFDSLNN

SEQ ID NO: 277295 - protein, 128 aa, Glycine max
  Clone ID: PAT_MRT3847_9241C.1.pep
MCGTVNMSEGLKKGKGLGHGEVLRHRMVGRDNIPVIRLPTIGGLKRISGVKCKKGLIVQKIFGVNVIFLEVVIREPVPCNEVAAMKAVYALNSEGAPLRQFRGLKGFDFYRISWFSVSYRVRVFYSFS

SEQ ID NO: 277296 - protein, 61 aa, Glycine max
  Clone ID: PAT_MRT3847_92421C.1.pep
CVSASGFVYSFIYTTPLRAHDSGALIQHIQGFLRGHAFRVQSLSGMDLDQCVSIKHAIQAE

SEQ ID NO: 277297 - protein, 692 aa, Glycine max
  unsure (1)..(692): unsure at all Xaa locations
  Clone ID: PAT_MRT3847_92422C.1.pep
MDLSSLSSYRTVGVTPSDPRKSLPQWGLHFLSYTHRLNQIKKRSSGVYASLSERERGEYYSQRPPTPLLDTVNYPIHMKNLSTXIADELRSDVIFSVSRTGGHLGSSLGVVELTVALHYVFNAPQDKILWDVGHQSYPHKILTGRRDQMHTMRQTNGLSGFTKRSESEFDCFGTGHSETTISAILGMAVGMDLXVIGSGAMTAGQAYEAMNNAGYLDSDMIVILNDNKQVSLPTANLDGPIPPVGALSSALSKLQSNRPLRELREVAKGVTKXAAKVDEYARGMISGSGSSLFEELGLYYIGPVDGHNINDLVAILNEVKSTNTTGPVLIHVITEKGRGYPYAEKAADKYHGVTKFDPPTGKQFKSKATTRSYTTYFAEALIAEAEADKDVVAIHAAMGGGTGMNLFHRRFPTRCFDVGIAEQHAVTFAAGLACEGLKPFCAIYSSFMQRAYDQVVHDVDLQKLPVRFAMDRAGLVGADGPTHCGSFDVTFMACLPNMVVMAPSDEAELFHMVATAAAINDRPSCFRYPRGNGIGVQLPTGNKGTPLEIGKGRILIEGERVALLGYGSAVQNCLAAASLVEHHGLRVTVADARFCKPLDRSLIRSLAKSHEVLITVEEGSIGGFGSHVAQFMALDGLIDGKLKWRPIVLPDRYIDHGSPADQLSLAGLTPSHIAATVFNILGQTREALEVMS

SEQ ID NO: 277298 - protein, 693 aa, Glycine max
  unsure (1)..(693): unsure at all Xaa locations
  Clone ID: PAT_MRT3847_92423C.1.pep
HLLTSHSQWGLHFLAYAHRLHQMKKRPCGVYASLSERGEYYSHRPPTPLLDTVNYPIHMKNLSTKELKQLADELRSDVIFSVSRTGGHLGSSLGVVELTVALHYVFNAPQDKILWDVGHQSYPHKILTGRRDQMHTMRQTNGLSGFTKRSESEFDCFGTGHSSTTISAGLGMAVGRDLKGRKNNVVAVIGDGAMTAGQAYEAMNNAGYLDSDMIVILNDNKQVSLPTATLDGPIPPVGALSSALSRLQSNRPLRELREVAKGVTKRIGGPMHELAAKVDEYARGMISGSGSSLFEELGLYYIGPVDGHNINDLVAILNEVKSTKTTGPVLIHVITEKGRGYPYAEKAADKYHGVTKFDPPTGKQFKSKATTQSYTTYFAEDFDCRSGTXQRKQFKSKATTRSYTTYFAEALIAEAEADKDVVAIHAAMGGGTGMNLFHRRFPTRCFDVGIAEQHAVTFAAGLACEGLKPFCAIYSSFMQRAYDQVVHDVDLQKLPVRFAMDRAGLVGADGPTHXGSFDALMMACLPNMVVMAKXIGVHFPTWIKGKQPEMGKGRILIEGERVALLGYGSAVQNCLAAASLVECHGLRLTVADARFCKPLDRSLIRSLAKSHEVLITVEEGSIGGFGSHVAQFMALDGLLDGKLKWRPIVLPDRYIDHGSPADQLSLAGLTPSHIAATVFNVLGQTREALEVMS

SEQ ID NO: 277299 - protein, 55 aa, Glycine max
  unsure (1)..(55): unsure at all Xaa locations
  Clone ID: PAT_MRT3847_92424C.1.pep
VLLPQTNTCCFLIKLWXXXXXGGLSVIKPWHQGTTHNQISTSSSLTISILNSTQF

SEQ ID NO: 277300 - protein, 208 aa, Glycine max
  unsure (1)..(208): unsure at all Xaa locations
  Clone ID: PAT_MRT3847_92425C.1.pep
PRVRFVWHPPNLAPSTRRESLDGQGKLVLEELSESICMEEPSLLSGVELKLVDPGNIRNVKGMAKLILNFLSSSSLKMEPSKRPEAVQGLLNLSLFETXEAYNVSHSLSLSCGAIITKKADRMVPWQGQSSKLSTLTNWSRGNASLIQYATYFSQAILQGVPRENHDHVPALSELMTLAFVLRFSNETTEFLMESKSLHCEDEEFLSS

SEQ ID NO: 277301 - protein, 81 aa, Glycine max
  Clone ID: PAT_MRT3847_92426C.1.pep
NVLYFLKKKKKKKKKKKKEKKKKKKKKKKKKMKKKKKLKKKQKKARKYKGVLTLRAQGVKPRELPQNKHLWKNLLFLPLVG

SEQ ID NO: 277302 - protein, 103 aa, Glycine max
  Clone ID: PAT_MRT3847_92427C.1.pep
RTHTRTRADKQCVCSRRHFSAIRREEPCLFTLELEQNQKCCLEKPFARPGFYFTRLSEASSLSSLEGIKNYPYLSPSIRISVAVALQELTVASNSTTSLMTCC

SEQ ID NO: 277303 - protein, 92 aa, Glycine max
  unsure (1)..(92): unsure at all Xaa locations
  Clone ID: PAT_MRT3847_92428C.1.pep
KKAAYTILGAVSAPRLEPTSAIMGHVVNWVNRHYXAMAGDYXALDVLPPEVDGXPIVPALRDFFDDALNYPARELNSKTLVDGLGNVWDQFP

SEQ ID NO: 277304 - protein, 125 aa, Glycine max
  unsure (1)..(125): unsure at all Xaa locations
  Clone ID: PAT_MRT3847_92429C.1.pep
HASGIVSWTXIIAGLAMHGCGEEAIQLFHEMEESEVRPDGITFISLLYACSHSGLVEEGCGXFSTMKNXYGIEPAMEHYGCMVGLYGRAARLQKAYEXICEMPVSPNAIIWKTLLGACSIHGKFE

SEQ ID NO: 277305 - protein, 202 aa, Glycine max
  Clone ID: PAT_MRT3847_9242C.1.pep
TSIKKTYYRSGLFPSLSYFPLTFPLSTFPFIYSKWLPLLQPFSPACPSWGWFRVPSPTPPRRPIPWPLCEASRTRCPTRFTTTSVPRVSFLSLSARLDKPPSRSAKSFQVPSRSKSRLPLAVPRRRSSRQQSLPQVQRTRSRRSLESVTSKIWRSTTTRGPPASFPSLSARLDKPPSRSAKNFQVPSRSNLRMPLAAPRRRS

SEQ ID NO: 277306 - protein, 53 aa, Glycine max
  Clone ID: PAT_MRT3847_92430C.1.pep
MVNKLSPVTIGSVYLYSFWKWRWLVYCNRSGSFDANKIPFFREDPPCMKDYGK

SEQ ID NO: 277307 - protein, 110 aa, Glycine max
  Clone ID: PAT_MRT3847_92431C.1.pep
MAFNSKRAPISSSKALADAASWCCACLLVSLLLLCIFRDSSALHDDQGNLMIRSSHVLSKPCDEIYVVGEGETLHTISDKCGDPFIVEKNPHIHDPDDVFPGLVIKITPS

SEQ ID NO: 277308 - protein, 88 aa, Glycine max
  Clone ID: PAT_MRT3847_92432C.1.pep
IIIKWLGVLANVKILTIGLCAIQTILHDLLNPTSIRTQPPKFVRLESLKVKVGNPLSTKNTSDEKVTRAVEYLLQNSPMPRFDIIRSA

SEQ ID NO: 277309 - protein, 129 aa, Glycine max
  Clone ID: PAT_MRT3847_92433C.1.pep
MDRSGIVWGATNAIMRRGALLWDEALKSSAKPHPHSTLCQKMRISVGNWVKLLSIWQYSIPFLINLSASATFFAILSDAPLSLAVPVTNATTFAATAVFGILLGERTHLPRAFFGTALIVLGLCFCIHT

SEQ ID NO: 277310 - protein, 98 aa, Glycine max
  unsure (1)..(98): unsure at all Xaa locations
  Clone ID: PAT_MRT3847_92434C.1.pep
CNKRYAFGLRFSKKKKKKKKKKKKKKKKKKKTQGGARSPIPPIGGLFTPPNWPSFYNVLTGKTLEXPNLTALRHIPLSPAGVISKRPEQIALPNNCPP

SEQ ID NO: 277311 - protein, 110 aa, Glycine max
  unsure (1)..(110): unsure at all Xaa locations
  Clone ID: PAT_MRT3847_92435C.1.pep
RYKFRALLRPFRDKEGGRFGGSPKEAPNISVYHGPQKKGGGGLIPPPNTYTPSPDXVRGQMVYCAIDKDAQALCVFYKKKEKGPEKKKGHKKEEYACAQADGEAPARGVV

SEQ ID NO: 277312 - protein, 66 aa, Glycine max
  Clone ID: PAT_MRT3847_92436C.1.pep
KEAHRPSLRYLNASLQVLHYTSACRSTRMSSKQASCISSTKQNNTNLFSSIEPFSAILPNSSRLGS

SEQ ID NO: 277313 - protein, 71 aa, Glycine max
  Clone ID: PAT_MRT3847_92437C.1.pep
IYGNRLCLFHVVSILKPRLISSCCRAFQPQANHVHKQWLTHSQSERHPQTRYHLQFFQHNSHQCSKYRCSP

SEQ ID NO: 277314 - protein, 250 aa, Glycine max
  Clone ID: PAT_MRT3847_92438C.1.pep
MASKSFTLILLILTTFLMAQTQAQAPAPAPSGAVNLTAILEKGGQYTTLIKLLKDTQQLTQIESQLKSNSQGFTLFAPTDNAFQSLKPGALNDLSDDKKVKLILFHVTPKYYTISDLLTVSNPVRTQATEEEGTWGLNFTGQGGNQVNISTGVVQTQLNNALREKFPLAVYQVDKVLLPLELFGTTKTTHSSEAPSPKGSKSTPEIPSVGKAGGAPSPHGDKKDTNAANGRNVAFGLVVGLALICIEALH

SEQ ID NO: 277315 - protein, 108 aa, Glycine max
  Clone ID: PAT_MRT3847_92439C.1.pep
LLRALYRDMAGYNQMETRYEAQEETGRKLDHGDIFRPPVHTYLFCVYDRTGVQIFATTLVTLIFALLGHLYSYNRGGLMTATAQLWVYKDLLTGYSSTRLYTMFTDTE

SEQ ID NO: 277316 - protein, 313 aa, Glycine max
  Clone ID: PAT_MRT3847_9243C.1.pep
IGGEDLLQNMMHHLLPNSENLFKNHGVKEIKQMGLLRVATQDAIRQLSSQTIVQVDVDLGDGLKICKAVNREEFEEVNRKVFEKCESLIIQCLQDAKVEVEEVNDVIIVGGCSYIPRVKNLVTNVCKGKELYKGMNPLEAAVCGAAVEGAIASGVNDPFGNLDLLTIQATPLAIGIRADGNKFVPVIPRDTTMPARKELVFTTTHDNQTEALILVYEGEGEKAEENHLLGYFKIMGIPAAPKGVPEINVCMDIDAANVLRVLAGVVMPGSRQPAIPVMEVRMPTVDDGHGWCAEALNRTYGATLDLVTLQKKA

SEQ ID NO: 277317 - protein, 89 aa, Glycine max
  unsure (1)..(89): unsure at all Xaa locations
  Clone ID: PAT_MRT3847_92440C.1.pep
PITSPAVTIALLLVMVMIYHTRWKQKQNPTNQQIKIFLERQGPLQTKRYDYSEIKKVTNSFRNKLGQGGFGSVYKGKLPDGXYVAVKIL

SEQ ID NO: 277318 - protein, 73 aa, Glycine max
  Clone ID: PAT_MRT3847_92441C.1.pep
LVLFLFTKTAYDIQVEFLPSPFWMMVMISLAEKGIKNESTQEDSLNKSPLFLKMNPPYKKNPDLIHNYAHTFE

SEQ ID NO: 277319 - protein, 82 aa, Glycine max
  Clone ID: PAT_MRT3847_92442C.1.pep
KSHKKNKPEEKREKPGGPKEGPNPNKGGGANGPFSRGKTGGASGKKKPPNPGEKGVGEWAPRGVFFFTRERGKRGGPLTAGP

SEQ ID NO: 277320 - protein, 78 aa, Glycine max
  Clone ID: PAT_MRT3847_92443C.1.pep
VMSGSRHQRMNAIRIRKENQVYSAEDKRALAMFNYEEKAKREHKVMADLQRLVQRHIGQDVGPTHDPFAAKASDGADA

SEQ ID NO: 277321 - protein, 268 aa, Glycine max
  unsure (1)..(268): unsure at all Xaa locations
  Clone ID: PAT_MRT3847_92444C.1.pep
MAATLMAATTSSGTLKATPFLGQGKGANANALRDVVSMGTGKYTMGNDLWYGPDRVKYLGPFSAQTPSYLKGEFPGDYGWDTAGLSADPEAFAKNRALDMIHGRWAMLGALGCITPEVLEKWLRVDFKEPVWFKAGAQIFSEGGLDYLGNPNLVHAQSILAVLGFQVILMGLVEGYRINGLDGVGEGNDLYPGGQYFDPLGLADDPVTFAELKVKEIKNGRLAMFSMFGFFVQAIVTGXGPLENLLDHLDNPVANNAWVYATKFSPGS

SEQ ID NO: 277322 - protein, 62 aa, Glycine max
  Clone ID: PAT_MRT3847_92445C.1.pep
GGLFSFIIGDEGCGSIDFFFQERSIPFSLCSAGFVSPYQCVLFLRQIIPRLGNFLLNHSFSS

SEQ ID NO: 277323 - protein, 218 aa, Glycine max
  Clone ID: PAT_MRT3847_92446C.1.pep
RKRFGFEGEEFRKAKASSTGSFTAPDPGLKRKSPPEALSGSLPPATTCPASSTPAPTIIPAPAAPGKPASAATVKRKRKSRWGPEEDKVELPPAELVQRDVDASPSPLSVQDLKGLGYEKGKPVGLVGVTELSDAQKKQLKEQQEMQQMYDMIMQHKRAMQDMQLLWEKAVQQHQHGYDSDEEVDSELGTCEHQLRRMEMDKTSEWAEQLTKMGRGKH

SEQ ID NO: 277324 - protein, 88 aa, Glycine max
  Clone ID: PAT_MRT3847_92447C.1.pep
ANQVSEVRGKIVMWDGSVQEIEQPLTVAELMLEHPEQVVVKLHSAVTQTRATPLPADHKLETHKVYRVLPIKRRKRVGLSGEDTRRIL

SEQ ID NO: 277325 - protein, 102 aa, Glycine max
  unsure (1)..(102): unsure at all Xaa locations
  Clone ID: PAT_MRT3847_92448C.1.pep
KWIRAVLFASCLSLHTLLLDRLALDGDIIFVIVAASSLLVSTFRDNTVRVVVCFIIACYLLQPHIXVSGGFRNSFTKASGILNSIGIIXLLVYPXWAXVVII

SEQ ID NO: 277326 - protein, 145 aa, Glycine max
  Clone ID: PAT_MRT3847_92449C.1.pep
MSRVSANSSPSRLVSMASIVRAYTLPILLFAGAMFYQLFLIPNAFPPSHYDVLQIESYSSVEKVKEAYDKLESKWNSAVEVFDIHEFLKIRYAYELLTNPLWKRDYDIFGIDEQLHIVESASKRYAGKHISELGFPFTTGPLLDL

SEQ ID NO: 277327 - protein, 157 aa, Glycine max
  Clone ID: PAT_MRT3847_9244C.1.pep
MNPHSLLASAAIDIGLALVTLPLFSVLKKQPSNAPIYYARPLSRRHHLPFDDSSSSLNRFLPSLAWLSRAFRVTEDEIVQDHGLDALVIIRLFKFGIKFFTVCSLVGLVVLLPTNYGAQEVQNGSYFTMDSFTISNVKRGSNRLWVHFAFLCFISLY

SEQ ID NO: 277328 - protein, 55 aa, Glycine max
  Clone ID: PAT_MRT3847_92450C.1.pep
HLLRSCVELLKPSWLLFLRPGGPITLLTIICCGNLLTLIDNFCEKTAEHQSSHSL

SEQ ID NO: 277329 - protein, 157 aa, Glycine max
  Clone ID: PAT_MRT3847_92451C.1.pep
STYYRGISHAFTTICRDEGFLGLYKGLGATLLGVGPDIAISFSVYESLRSFWQSRRPDDSTVMISLACGSLSGVASSTATFPLDLVRRRKQLEGAGGRARVYNTSLFGTFKHIIQNEGVRGLYRGILPEYYKVVPSLGIVFMTYETLKMLLSSIPRD

SEQ ID NO: 277330 - protein, 180 aa, Glycine max
  Clone ID: PAT_MRT3847_92452C.1.pep
MANQAVYSVWAIPPEDVGARCANLMTALRSEFGGPHFHPHITVVGAIKLTPEDAVTKLRSACQALRPFHVTVDRVAAGSFFYQCVYLLLRPDPHLLETSAHCCTHFGYTNSTPYMPHLSLLYGDLSDEEKRKAQERANAIDDTLGGLTFQITRLALYKTDTEDKTLKSWEKIAECTLTPN

SEQ ID NO: 277331 - protein, 58 aa, Glycine max
  Clone ID: PAT_MRT3847_92453C.1.pep
PGNTSCQAQSKYPIHTIMHPISQDLLGILSTAWIAQVTILLSYKMQILMQIFYNTRGS

SEQ ID NO: 277332 - protein, 58 aa, Glycine max
  unsure (1)..(58): unsure at all Xaa locations
  Clone ID: PAT_MRT3847_92454C.1.pep
AHEXTVHTDVLMGLXKNVQLXRSSSVSXGQGLIXGNKXMNKLLEKENDQSGSFLKKXT

SEQ ID NO: 277333 - protein, 146 aa, Glycine max
  Clone ID: PAT_MRT3847_92455C.1.pep
KCKPNTPLNFKFFCFSDMQRKRRPMIDYMDKVQKQVTTTMRTILVDWLVEVAEEYKLLSDTLHLSVSYIDRFLSVNPVSKSRLQLLGVSSMLIAAKYEEVDPPRVDPFCNITDNTYHKAEVVKMEADMLTTLKFEMGNPTVNTFLR

SEQ ID NO: 277334 - protein, 67 aa, Glycine max
  Clone ID: PAT_MRT3847_92456C.1.pep
GWSFEHAKSLGPKGSDCPKAPVFGDPLGGPLKDTFGPSLNLLFKLKAGEFFGFAPLFATHGGLLFKI

SEQ ID NO: 277335 - protein, 56 aa, Glycine max
  Clone ID: PAT_MRT3847_92457C.1.pep
AREVYGYHTDGPLKLPCSVDDFLHLRWRIEKESAPNQNHHNHSHHRLPHALHFHSC

SEQ ID NO: 277336 - protein, 96 aa, Glycine max
  unsure (1)..(96): unsure at all Xaa locations
  Clone ID: PAT_MRT3847_92458C.1.pep
CFGLSGLTQVKVPALVVPFXGMYVSLPGRDYLFLVDPRGSIWLGFAGTISGLSIIGGFQPQGLRVSFDLWGSRLGFAPYGCVLDLGNGLVSVPVAF

SEQ ID NO: 277337 - protein, 139 aa, Glycine max
  Clone ID: PAT_MRT3847_92459C.1.pep
PDLFHYQHSLTGLTPLMVFAGKGRVGDMCMLLSCGADCHLRAKDGMTALEIAERENQPEAAEILKKHMDNDFSNSIEEKKLLDKYLATVNPELVDDVLIEQLIRKICIDSTDGGILVFLPGWDDINRTRERLLASPFFR

SEQ ID NO: 277338 - protein, 63 aa, Glycine max
  unsure (1)..(63): unsure at all Xaa locations
  Clone ID: PAT_MRT3847_9245C.1.pep
VVRFLVSRRKRXKPESAXNCNGXAKKXRPXTXSFPTGXXXKXXPXXKFFSTSGCPLGXGCHGL

SEQ ID NO: 277339 - protein, 215 aa, Glycine max
  Clone ID: PAT_MRT3847_92460C.1.pep
MDGSGHYVSLAQFDDDGISMAKHLESANTMFSFIWWVVGFYWVSADSESLVRDSPLLYWLCIAFLGFDVFFVVFCMALACIVGIAVCDRPSGIIALLYAVADQEGASKEDIEQLSKFKFQRTETNEKHAGNTQGAAGGIMIECDADSPIEHVLSDEDAECCICLSAYDDGVELRKLPCSHHFHCACVDKWLHINATCPLCKYNILKSTSHGQDEV

SEQ ID NO: 277340 - protein, 51 aa, Glycine max
  unsure (1)..(51): unsure at all Xaa locations
  Clone ID: PAT_MRT3847_92461C.1.pep
LGGKQSLSICVFILKDYGTCLDFQTGPFNDALERNKKQITXRLWIKIKEIN

SEQ ID NO: 277341 - protein, 249 aa, Glycine max
  Clone ID: PAT_MRT3847_92462C.1.pep
DHLSAYSKEPLSFSLRLKIALGSAKGLLYLHTEANPPIFHRDVKASNILLDSRYTAKVADFGLSRLAPVPDTEGNVPGHVSTVVKGTPGYLDPEYFLTRNLTDKSDVYSLGVVLLELLTGRPPIFHGENIIRQVNMAYNSGGISLVVDKRIESYPTECAEKFLALALKCCKDTPDERPKMSEVARELEYICSMLPESDTKGHDYVITSDSSGTIFSSEPSSSVIKTPFISGDVSGSDLVSGSIPTIKPR

SEQ ID NO: 277342 - protein, 41 aa, Glycine max
  Clone ID: PAT_MRT3847_92463C.1.pep
MRFRFVIIIVFINNIVLFYKRILYGNVKKRLYVQDALKMKQ

SEQ ID NO: 277343 - protein, 49 aa, Glycine max
  Clone ID: PAT_MRT3847_92464C.1.pep
GTNNVAFNLKQSRCLRRHPQDNRTLDLLNKLQPFGEVIDNNGAEASPPV

SEQ ID NO: 277344 - protein, 61 aa, Glycine max
  Clone ID: PAT_MRT3847_92465C.1.pep
QSHPLQPQEHEQPQRRGGTCQVSAASRWCLFLILTQPVLVCSSCHFFSPMKLRTTVALKTW

SEQ ID NO: 277345 - protein, 125 aa, Glycine max
  unsure (1)..(125): unsure at all Xaa locations
  Clone ID: PAT_MRT3847_92466C.1.pep
GKQGRPGPDRNARADPPHRSYNARGKGKRRGGXQQQAGPPPRRGXXPGAXRPPGRSKAPAPGTRRSAQRPQKHPQDKGAPPTPXXTARXGGXXXPPHPPHAPTQTRPTPPPPRADTHRNPRHPPP

SEQ ID NO: 277346 - protein, 54 aa, Glycine max
  Clone ID: PAT_MRT3847_92467C.1.pep
VKLHLMIINNNNVYTFNMFYKCLGGNPFVKGSIIIRFVLICSIDTPLLSSSRSR

SEQ ID NO: 277347 - protein, 82 aa, Glycine max
  Clone ID: PAT_MRT3847_92468C.1.pep
RLVVLFSVVSKYIGVIKLDCIYHPIWFSKDWMNLQIAYAKVSTCLLDISNWFNFFKIYSLSLINKHVSIAITHPLILKKCFG

SEQ ID NO: 277348 - protein, 119 aa, Glycine max
  unsure (1)..(119): unsure at all Xaa locations
  Clone ID: PAT_MRT3847_92469C.1.pep
RSLAVDVICFFIGPTKLNSLVRCPTTIKTEKPPVTTQLSGIAHHPPFTSXRNKKEAPTDRSYQQWPTLNDESNPPCSESLRGAGLVPTHKPTASLGTPLPPPSFFFFPSFPATSVFSPH

SEQ ID NO: 277349 - protein, 148 aa, Glycine max
  unsure (1)..(148): unsure at all Xaa locations
  Clone ID: PAT_MRT3847_9246C.1.pep
IRLIDKAFTPIAFFHTDYNTHAGGLTLDHLLSPANDPKYKIFLEYAKPPATSVDGXVGPGTTEESPAVDAHPRNTSAKITIRATELCKKKSFXRRTSGSAKMXPKKVLFEALQKHQTLMLAEGSHCHGTLKKAAIDHANNYWTHHAHC

SEQ ID NO: 277350 - protein, 53 aa, Glycine max
  Clone ID: PAT_MRT3847_92470C.1.pep
GKRWWVQAQYHDLDASQRRWLRWVPRKYPIYNFCLDKNRYPQFPPECKKNRAI

SEQ ID NO: 277351 - protein, 76 aa, Glycine max
  Clone ID: PAT_MRT3847_92471C.1.pep
EESEIKSDSNQLLALTPRKISPLTSAFPYLKQRILGTLNSNKLHPLSIQNKPKNRKLVTSINYTFASYQMCYLPLI

SEQ ID NO: 277352 - protein, 167 aa, Glycine max
  unsure (1)..(167): unsure at all Xaa locations
  Clone ID: PAT_MRT3847_92472C.1.pep
MEKSVRELGVQDLVNAGGLTLAEANELYHVLTDILSQSQSPSHIWHQIVTRRLLKPSFPHSLHQLLYYSVYHSAFHSQHASLPHYWFPSIEQSKRTNLGRLMETHAPKLLGASYKDPITSFHLFHKFSVXHPQVYWSLILXELSVSFVEPPKCILDTSSDPSNMEGL

SEQ ID NO: 277353 - protein, 48 aa, Glycine max
  Clone ID: PAT_MRT3847_92473C.1.pep
GSQIRGVVSEISPPIQETVVGKHRLPWPPLIVSLDGNTYSTAIYRYVI

SEQ ID NO: 277354 - protein, 110 aa, Glycine max
  Clone ID: PAT_MRT3847_92474C.1.pep
MASARGTTRVGVRTRARTPVVEEIVPNSGWTEDSAGHYLLVDLPDFRKEEMKLQVNSYGRIVVSRERNLNEWKHVHFRLTFPAPLNSDMDKIAGKFDGGILYVTVPKQVT

SEQ ID NO: 277355 - protein, 95 aa, Glycine max
  Clone ID: PAT_MRT3847_92475C.1.pep
WNLRCVLAIDNRALNIAFCCITISNLLTTYILFFIRPFVHLCYSEVFLLSTEMNDSVAEMHVHLGENLPLNQPKTRSTSPLSFLDKANICFIKFI

SEQ ID NO: 277356 - protein, 308 aa, Glycine max
  Clone ID: PAT_MRT3847_92476C.1.pep
QTLGCGGMILCTAINHCLCDGIGTSQFLHAWAELTRKPESELSTMPFHWRHVLKPREPAHVKFHHAGYTGPYPTPQVDLLKFIQSQPVVPVSFAFTPSHVLRLKKHCVPSLKCTSFETVAAHTWRSWIRSLNQSLPSKLIVKLLFSVNVRAIVDLPQGYYGNGFLLACADSTVEELVEGNLRHGVKLVQEAKVRLKDKEYIRSMVDLLEDKTVKTDLSTSLVISQWSKLGLEEVDFGEGKPLHMGPLTSDIYCLFLPVTGDANAVRVLVSVPESMVERFQYHMNESWQGKEENGNHHDVQHHNENGFF

SEQ ID NO: 277357 - protein, 48 aa, Glycine max
  Clone ID: PAT_MRT3847_92477C.1.pep
LLLSYCRYFQILLLPLFMDSSSNSVMEVEFESSSLHLVLSFALYNILY

SEQ ID NO: 277358 - protein, 53 aa, Glycine max
  unsure (1)..(53): unsure at all Xaa locations
  Clone ID: PAT_MRT3847_92478C.1.pep
MAGLAPEGIHTLDARQYDTKMTELLTSDGQXDFITSYDEVHDXSLDAMGLQEN

SEQ ID NO: 277359 - protein, 64 aa, Glycine max
  Clone ID: PAT_MRT3847_92479C.1.pep
HLYEDQQILQLLERKVIKDEFIQYPFPILWLDESHLHLLDLNVVGCGIESNTSLFTSIIRLYWK

SEQ ID NO: 277360 - protein, 152 aa, Glycine max
  unsure (1)..(152): unsure at all Xaa locations
  Clone ID: PAT_MRT3847_9247C.1.pep
MVRVTFFSFFPPSLSLTMAKNPLLCSIVLLAVLAGATSDDGAELDYSKLSGIIIPGFASTQLRAWSILDCPYSPLDFNPLDLVWLDTTKLLSAVNCWLKCMVLDPYNQTDHPDCKSRPDSGLSGITELDPGYITRPLSXVWKEWIKWCIEFG

SEQ ID NO: 277361 - protein, 132 aa, Glycine max
  Clone ID: PAT_MRT3847_92480C.1.pep
KAPLGGVIASPFSPGWRIFFSGGRLPFSFFKGGCWLRPINGGSSLPLGPPAFPLLALGVFFFGIWRCALFFSCKWVGFVCARVLFSLFPGNMVCPLVPGSNFPRVPGVVVKHQDIIKIKIEKIVSLKKKKKN

SEQ ID NO: 277362 - protein, 64 aa, Glycine max
  Clone ID: PAT_MRT3847_92481C.1.pep
WCSQYQSLQVYQALTYSNREVSIVVIMGLTMCTCCISAFLSTFSCVIYDLMLPCILAVRECRVK

SEQ ID NO: 277363 - protein, 113 aa, Glycine max
  unsure (1)..(113): unsure at all Xaa locations
  Clone ID: PAT_MRT3847_92482C.1.pep
MQRGKLSFPHSTSQSVXRMPLYIWGGAGATNAILMNMPNAEIHMWRYHAGDRAFDESKITGPYINRTGSVLISSGKRTDDTISHKGYPHKLMHIIELHYKEVFKGAHQEFFTH

SEQ ID NO: 277364 - protein, 208 aa, Glycine max
  unsure (1)..(208): unsure at all Xaa locations
  Clone ID: PAT_MRT3847_92483C.1.pep
MEKARKEISNKLRQVQSNAVDKTAMKENGNDFQEVSEKGEKCSRNSEMCAQDNIEKSEDRKSGSRAIKPFAGSTIAKVSRKFLETTPVDVLYPDFHDFCKDRTEGSFGENQVWAVYDNDDGMPRCYVLIRRIISLNPFKMQISWLNPNTNSELGPLKWVASGXSXICGDFRTSRPEICGSTNFFSHKVRWRTGAXGAICIYPRKSDVW

SEQ ID NO: 277365 - protein, 69 aa, Glycine max
  Clone ID: PAT_MRT3847_92484C.1.pep
VLTYKIRLMVKKWKMINLFLFRYNYMIIIYYSKNVNILYLRCLTHHSLYIYVRIIFFTVCTHKLNILII

SEQ ID NO: 277366 - protein, 48 aa, Glycine max
  Clone ID: PAT_MRT3847_92485C.1.pep
HQNSAFVNLKGVSLDLCLHRPEEARQLRGRAPSSVLWHPKVNVAPIPE

SEQ ID NO: 277367 - protein, 457 aa, Glycine max
  Clone ID: PAT_MRT3847_92486C.1.pep
TVLPSIPTPNEKLFSLIEQIKLRTHAPLLYVYKPHPDHDASTFVNTLRHSLSQALTIYYPLAGRLSSIEGGKWELHCNAKGAQLLEANCKDLNLDDLGDFVPTHLVSQLIPNIDYNVLVEDIPLLVVQLTRFPCGGVTIGVALCRCTIDGTASMRFMTTWAKLARKENLDHVEMMPCCDRNKLNSYKVDDSRSHDHSEFRTPPNWLGSLGGRDTNVVVAIVKLTDAQVKKLKHKVNYVNIINTTRASSTSRPYSTFEVVAGYLWKCVSKARYEGKSDQPTRLSTLVNCRNRITPPLPNGYAGNAAFPTVTPTCSFGEIMQKPLGYAVGNVRVALERVTREFVGSALDPIAKEKDMNLVRYNFHYPTSSVHKGPYKGNPNLFVVSWMNFSYKDADFGFGKPLYFGPGFMDAEGKAFVMNKANGDGLIVAISLEASHMDAFKKFFYGDIQEEEFPISKL

SEQ ID NO: 277368 - protein, 46 aa, Glycine max
  Clone ID: PAT_MRT3847_92487C.1.pep
VGSSASKVEELCAHYLIQILVCTTSLTCGVNHPDHLKIITGTEYYD

SEQ ID NO: 277369 - protein, 75 aa, Glycine max
  Clone ID: PAT_MRT3847_92488C.1.pep
EEEEEEEEEEKSNILEPDMYRNAASRLRVISVSYYLSSPSQILFIFSVSFIYYYRALDLTILCTFHYNAGFYSID

SEQ ID NO: 277370 - protein, 57 aa, Glycine max
  Clone ID: PAT_MRT3847_92489C.1.pep
YDLLGIDSSCSQAQVTVAYRYYHKRCHPDIAAPDDHDMTIILNEAYSMISDPTARIA

SEQ ID NO: 277371 - protein, 177 aa, Glycine max
  Clone ID: PAT_MRT3847_9248C.1.pep
MRSKSDPPVPPPSSSGGSDSSSGASIDPIFHLLRVLPFSFLRPPRLRLKLPSFTLPSPNAVFALLLLTYFMVVSGIVYDIIVEPPGIGSTQDPYTGAVRPVVFMSGRVNGQYIIEGLSSGFMFVLGGIGIILLDLALDRNRAKSVKVSYASAGVSSVVLAYVMSMLFIRIKIPAYLR

SEQ ID NO: 277372 - protein, 84 aa, Glycine max
  Clone ID: PAT_MRT3847_92490C.1.pep
FYKLTTDFQIGHVYAECRVKFSPHILNLMESYSYDMTELFCHIMLGEPMVSRYYHHTELAVGVDMNVPVEGLMASTGWDELVYF

SEQ ID NO: 277373 - protein, 93 aa, Glycine max
  Clone ID: PAT_MRT3847_92491C.1.pep
LGKTQLVLGLMFALLIRPTGKTYGSPELFVGAVFVPKKTSPFCFLPFRLKGGGDQLFDEPLMGGDPRVFVSFLGGGEGKLFIPHTVNKFAVVL

SEQ ID NO: 277374 - protein, 106 aa, Glycine max
  Clone ID: PAT_MRT3847_92492C.1.pep
EFLAGTGYVEAAVLEGYPAYFVWGAPLVDFTRRLVFCFRVLGGFRSLLSFFPVLVNLACFRSFFQDVKGLFFVSPPPCYYSRPPGVKLQAYGPSPPPGFTVMPPLF

SEQ ID NO: 277375 - protein, 67 aa, Glycine max
  Clone ID: PAT_MRT3847_92493C.1.pep
VEALNGGAHSLRRSSHCQVHYTPQWITGPLGPNTLWNAGGVRLKSGRLFRECRPSCGPTVCDDLHCN

SEQ ID NO: 277376 - protein, 149 aa, Glycine max
  unsure (1)..(149): unsure at all Xaa locations
  Clone ID: PAT_MRT3847_92494C.1.pep
GAGFPPGVLGVHXLKEVFQFPGKNPLELVNLLLLKKXLLVGKSFGAPAPSPLXIAKRPPNAGKPLFAVFPPLGGRFFSPGPFETLKPKPKSLVFPPLILSFSAPFLLFQVPSPPGGGVLFFSFGSGKKKKGFGWVFIAPPFIKKIKCFL

SEQ ID NO: 277377 - protein, 137 aa, Glycine max
  unsure (1)..(137): unsure at all Xaa locations
  Clone ID: PAT_MRT3847_92495C.1.pep
ASKQKPRRFRVSHCYFAFVHLSLTPQDFQEHIPIWISFHFVQPWIGVNLCRYGTKKAVTRVKPYXCTMPLRXDEGWNQIQFNLADFTKRAYGTNYVETLQVQVHANCRLRRIYFSDRLYSEEELPPEFKLYLPMQKS

SEQ ID NO: 277378 - protein, 190 aa, Glycine max
  Clone ID: PAT_MRT3847_92496C.1.pep
MFKNTFQSGFLSILYSLGSKPLQIWDKEVVDGHIKRLQDEDIQSNVLEIIGSNIQSTYITCPADPATTLGIKLPFLVIIVKNLKKYFTFEIQVLDDKNVRRRFRASNFQAVTRVKPYICTMPLRMDEGWNQIQFNLVDFTKRAYGTNYVETLRVQVHANCRLRRIYFSDRLYSEEELPPEFKLYLPMQKS

SEQ ID NO: 277379 - protein, 130 aa, Glycine max
  unsure (1)..(130): unsure at all Xaa locations
  Clone ID: PAT_MRT3847_92497C.1.pep
YIRVFAYLCLRGEPSSVLLTIDKWLKHSACYLVDQSNVGIKEHCGESDDVLQPGYHCLPXRLAHQIADILLLRVQQGDVRGETKTRVHDYVTVDAHDQYRAPCRKESDAFYRLTNTREQISSYALDVFWV

SEQ ID NO: 277380 - protein, 217 aa, Glycine max
  unsure (1)..(217): unsure at all Xaa locations
  Clone ID: PAT_MRT3847_92498C.1.pep
ASKNLEDLGFRIATSRSFISLSRLKIFKNTFQSGFLSILYSLGXSKPLQIWDKEVVNAHVKRPQDEDIQSNVLEIIGSNIQSTYITCPADPAATLGIKLPFLVLIVKNLKKYFTFEIQVLDDKNVRRRFQASNFQXAVTRVKPYXCTMPLRXDEGWNQIQFNLADFTKRAYGTNYVETLQVQVHANCRLRRIYFSDRLYSEEELPPEFKLYLPMQKS

SEQ ID NO: 277381 - protein, 83 aa, Glycine max
  unsure (1)..(83): unsure at all Xaa locations
  Clone ID: PAT_MRT3847_92499C.1.pep
XPXXXRXXXXXRXLXPXXXXXXIXXXPXLXPLXXXSXXXXXXXXXRXXXVXXXXXXLVNXXVXXXPNXFAXVRCXQXXXFXXG

SEQ ID NO: 277382 - protein, 123 aa, Glycine max
  Clone ID: PAT_MRT3847_9249C.1.pep
MASAVVNFLNATLDWVTFASDGPSARAVVFGVHIGGHLFIEVFLLVVILFLLSQKSYKPPKRPLTNKEIDELCDEWVPEPLIPSLNKELQYEPPVLESAAGPHTIINDKEGDNFAIRNYRWGD

SEQ ID NO: 277383 - protein, 108 aa, Glycine max
  unsure (1)..(108): unsure at all Xaa locations
  Clone ID: PAT_MRT3847_924C.1.pep
MIMGFLHKLWDETLAGPAPEXGLGKLRKYNSFSGGISVRSTVAEAVPISRSITIVRSQSGFGSTTTSASSSPSGSTTPRSPLTPEAPGGDFNKFTRRKSSTVESADNT

SEQ ID NO: 277384 - protein, 50 aa, Glycine max
  Clone ID: PAT_MRT3847_92500C.1.pep
LLDYCFSFINMMMMFIFIFVCSLSIYYIQKENAVISEKPYNCKRVCYNRL

SEQ ID NO: 277385 - protein, 63 aa, Glycine max
  Clone ID: PAT_MRT3847_92501C.1.pep
NSARALAETLKPQAYLSHPVFLVCLSSVSDPTGPPYIGALWHDANISLAPAVLTTPLETNTIY

SEQ ID NO: 277386 - protein, 103 aa, Glycine max
  unsure (1)..(103): unsure at all Xaa locations
  Clone ID: PAT_MRT3847_92502C.1.pep
RMHAYVSSEFGSXXXXXXGXXRIHGXNTKLHXXLLXGLXXCASXYNGLQXXTTXWTMXXXQXTLXFTXXXXXXXTXSXXXRXCRXXXQAIXSRIXKXXXSSXL

SEQ ID NO: 277387 - protein, 75 aa, Glycine max
  unsure (1)..(75): unsure at all Xaa locations
  Clone ID: PAT_MRT3847_92503C.1.pep
RXKILXXKXXXPLXLQXXIXINXXKNFXPXSXRXEXXXXFKXLIIXXXXFFFFFCTKLVIFHSSXIXSLXXXXYX

SEQ ID NO: 277388 - protein, 63 aa, Glycine max
  Clone ID: PAT_MRT3847_92504C.1.pep
MAPKGLTFLAVLICVSALSLSPSVAGEGQNNGLVMNFYKESCPHGCKTCITGTSASYLLQCAT

SEQ ID NO: 277389 - protein, 70 aa, Glycine max
  Clone ID: PAT_MRT3847_92505C.1.pep
SDFDAFDMIWVWCLTSPKWVVPIIIPHLFPLEFGLYDNLKMDAPTNNTSFNTHAAANVCLLCPNTAAQQG

SEQ ID NO: 277390 - protein, 75 aa, Glycine max
  Clone ID: PAT_MRT3847_92506C.1.pep
RQQDLDDGRTLHGYNITKERTLQLDLHIHGDEQNTVTTVTGAAVTLEVDSSDANDNVNAHIQDKGAIPPHQHRII

SEQ ID NO: 277391 - protein, 29 aa, Glycine max
  Clone ID: PAT_MRT3847_92507C.1.pep
FGQETTLLIVQRKQRLESSLPSEARSALL

SEQ ID NO: 277392 - protein, 116 aa, Glycine max
  Clone ID: PAT_MRT3847_92508C.1.pep
MEGLLPLVYKAIKRNKTRRQYECLSSGTSLGYNISMAEMYPQTQEHVLQNQTHAQKVFHHHHNESHKIGHRRYNSVGDHFDYGFQSSQMRTGVDAPSSNKLVRFRSQRMFSCITGV

SEQ ID NO: 277393 - protein, 54 aa, Glycine max
  Clone ID: PAT_MRT3847_92509C.1.pep
IYCVLTESHLGVDLRTRRSCYIALLPFHMCMDLYIYIDTCGWMECKVSYVPAST

SEQ ID NO: 277394 - protein, 54 aa, Glycine max
  Clone ID: PAT_MRT3847_9250C.1.pep
MASFLRSLRRRDVASASLSAYRSSTGSTKPAYVAHNWSSLSRPFSSRPAGNDVI

SEQ ID NO: 277395 - protein, 324 aa, Glycine max
  unsure (1)..(324): unsure at all Xaa locations
  Clone ID: PAT_MRT3847_92510C.1.pep
FQSSGIKLGTFKSVNESLTRVAVYISLIALYCLGGSKVKARVDPASXMSSFIGYXFTLTFAVQGLVNTFGDLRGTFAAVERINSVLSGAQVDDALAYGLKRELRQKTLDDENYKLILSNISTENNQKHYLHYMSALKTSSNLFSLAWSGDICLEDVYFSYPLRPDVEILRGLNLRLKFGTVTALVGPSGAGKSTVVQLLSRFYEPTSGCITVAGEDVRTFDKSEWARVVSIVNQEPVLFTVSVAYVXSYRLCYKDFPIIDIIKAAKASNAHDFIISLPQGYDTLVGERGGLLSGGQRQRIAIARALLKNAPILILDEATSALDA

SEQ ID NO: 277396 - protein, 50 aa, Glycine max
  unsure (1)..(50): unsure at all Xaa locations
  Clone ID: PAT_MRT3847_92511C.1.pep
DNKWGGSQSVVHLAHLVPSKRPGAGKAGSGDPXEKFCQTDPAHEEPQVYE

SEQ ID NO: 277397 - protein, 86 aa, Glycine max
  Clone ID: PAT_MRT3847_92512C.1.pep
GSCNARVLSGPPTGALREERARTRSCDLVSLEQKPQTSGMSRAHMGHNNTQSEGAHWLISAVGARADTLSILLGYKLKQVVDSQPN

SEQ ID NO: 277398 - protein, 45 aa, Glycine max
  Clone ID: PAT_MRT3847_92513C.1.pep
SFYGYFSPENLLHRGGFISMTGGPTNSNVLPRLSKNLFYMLHSSS

SEQ ID NO: 277399 - protein, 63 aa, Glycine max
  Clone ID: PAT_MRT3847_92514C.1.pep
LHSDRVEHHRNTHKIVALTMAYAAFPRCTTSHHAELQCLLTDSTTTPGKIGLNYSGSPKMGWC

SEQ ID NO: 277400 - protein, 73 aa, Glycine max
  Clone ID: PAT_MRT3847_92515C.1.pep
NSNARELTEKSLLPSCWPSHYDLKSDVGSHANFHSFYAQLCVRPIVILSSPICTILADKDWCVLKTVGTSHLL

SEQ ID NO: 277401 - protein, 40 aa, Glycine max
  unsure (1)..(40): unsure at all Xaa locations
  Clone ID: PAT_MRT3847_92516C.1.pep
PFSSXXHTXISHTPXHPTMSLTIPXXXXXXVALXSXXXPK

SEQ ID NO: 277402 - protein, 111 aa, Glycine max
  Clone ID: PAT_MRT3847_92517C.1.pep
GAQSATRLPLRFVLFIIAPGVSGFPIGKWAVSNTHLLLVGLLLRRPRFYLLCSRFVCCLELLPFSLFTQESPLSVLAPSFNATRYGGSWSASGPRFGVPGSPPGSFAPWKI

SEQ ID NO: 277403 - protein, 53 aa, Glycine max
  unsure (1)..(53): unsure at all Xaa locations
  Clone ID: PAT_MRT3847_92518C.1.pep
MSLVIPEKFXHILRXLNTXIDXRRKIXFAITAIXGVXRXYAHVVLXKADIDLT

SEQ ID NO: 277404 - protein, 48 aa, Glycine max
  Clone ID: PAT_MRT3847_92519C.1.pep
MGMVQVHMNIVVIGHVDSGKSTTTGHLIYKLGGIDKRVIEMFEKAATE

SEQ ID NO: 277405 - protein, 37 aa, Glycine max
  Clone ID: PAT_MRT3847_9251C.1.pep
LFFGRAKPDIVRCRSKYGKSWKQYCPKVPSRTLPGIY

SEQ ID NO: 277406 - protein, 47 aa, Glycine max
  Clone ID: PAT_MRT3847_92520C.1.pep
KILCPLVTVPSTCTFPLRIPLAKPFKAVSCGIGCMLICYYYINPFWN

SEQ ID NO: 277407 - protein, 61 aa, Glycine max
  Clone ID: PAT_MRT3847_92521C.1.pep
PHLPAINPLPRVAKSPPCAANLPFTCVFSGPWSRYILPLLKISPDYPRIIFRVLAHPIRPS

SEQ ID NO: 277408 - protein, 218 aa, Glycine max
  Clone ID: PAT_MRT3847_92522C.1.pep
LISTTMSGVTCCLRFPGQLNSDLRKLAVNLIPFPRLHFFMVGFAPLTSRGSQQYRSLTIPELTQQMWDARNMMCAADPRHGRYLTASAMFRGKMSTKEVDQQMINVQNKNSSYFVEWIPNNVKSSVCDIPPTGLSMSSTFMGNSTSIQEMFRRVSEQFTVMFKRKAFLHWYTGEGMDEMEFTEAESNMNDLVAEYQQYQDATAVDDHEDEDEDEAMAA

SEQ ID NO: 277409 - protein, 58 aa, Glycine max
  Clone ID: PAT_MRT3847_92523C.1.pep
KSMLSQLCSFLTPQPLKLIVTNSIFTRSCQLLSKEKKRIEIVNLFHFLRLSINTLFCR

SEQ ID NO: 277410 - protein, 446 aa, Glycine max
  Clone ID: PAT_MRT3847_92524C.1.pep
MREILHVQAGQCGNQIGGKFWEVMCDEHGIDATGNYVGNSHLQLERVNVYYNEASGGRYVPRAVLMDLEPGTMDSLRSGPFGKIFRPDNFVFGQNGAGNNWAKGHYTEGAELIDSVLDVVRKEAENCDCLQGFQICHSLGGGTGSGMGTLLISKIREEYPDRMMLTFSVFPSPKVSDTVVEPYNATLSVHQLVENADECMVLDNEALYDICFRTLKLTNPSFGDLNHLISTTMSGVTCCLRFPGQLNSDLRKLAVNLIPFPRLHFFMVGFAPLTSRGSQQYRSLTIPELTQQMWDARNMMCAADPRHGRYLTASAMFRGKMSTKEVDQQMINVQNKNSSYFVEWIPNNVKSSVCDIPPTGLSMSSTFMGNSTSIQEMFRRVSEQFTVMFKRKAFLHWYTAEGMDEMEFTEAESNMNDLVAEYQQYQDAAASEEGENEIDDEEAMAA

SEQ ID NO: 277411 - protein, 206 aa, Glycine max
  Clone ID: PAT_MRT3847_92525C.1.pep
MACENDNNNKGLLLALGLVLCVTLSFFPRVTEGRVPFACDPRNGLTRGFKFCNTHVPIHVRVQDLIARLTLPEKIRLVVNNAIAVPRLGIQGYEWWSEALHGVSNVGPGTKFGGAFPGATMFPQVISTAASFNQSLWQEIGRVVSDEARAMYNGGQAGLTYWSPNVNIFRDPRWGRGQETPGEDPTLAAKYAASYVKGLQGDSAGN

SEQ ID NO: 277412 - protein, 43 aa, Glycine max
  Clone ID: PAT_MRT3847_92526C.1.pep
SIYVFTIRVEILCLPSIRSLSYMCLCLFMYSLAKLFLFLHYFL

SEQ ID NO: 277413 - protein, 341 aa, Glycine max
  Clone ID: PAT_MRT3847_92527C.1.pep
MACENDKKGHLLLALGLVLCVTLTFFPRVTEGRVPFACDPRNGLTRGFKFCNTHVPIHVRVQDLIARLTLPEKIRLVVNNAIAVPRLGIQGYEWWSEALHGVSNVGPGTKFGGAFPGATMFPQVISTAASFNQSLWQEIGRVVSDEARAMYNGGQAGLTYWSPNVNIFRDPRWGRGQETPGEDPTLAAKYAASYVKGLQGDGAGNRLKVAACCKHYTAYDLDNWNGVDRFHFNAKVSKQDLEDTYDVPFKACVLEGQVASVMCSYNQVNGRPTCADPDKHYPMGYGYIVTATGVFFENLVSNLASSFLLRISLKGFIKRSISTTAIEILLITFVSNLSQYQ

SEQ ID NO: 277414 - protein, 22 aa, Glycine max
  Clone ID: PAT_MRT3847_92528C.1.pep
ILVKIPAGYRKIIPIGPNKVIA

SEQ ID NO: 277415 - protein, 69 aa, Glycine max
  Clone ID: PAT_MRT3847_92529C.1.pep
DEVHLHIRYLVSLIIPQWAYILLNKQRVLSKVLYTSILLCICHELSVLSPLSITRSVPQAPIITAHHGQ

SEQ ID NO: 277416 - protein, 483 aa, Glycine max
  Clone ID: PAT_MRT3847_9252C.1.pep
MASAVVNFLNATLDWMTFASDGPSARAVVFGVHIGGHLFIEVFLLVVILFLLSQKSYKPPKRPLTNKEIDELCDEWVPEPLIPSVNKELQYEPPVLESAAGPHTIINGKEVVNFASANYLGFIGHPKLLDSCSSALAKYGVGSCGPRGFYGTIDVHLDCEARIAKFLGTPESILYSYGLSTMFSAIPAFSKKGDVIVADEGVHWGIQNGLYLSRSTVVYFKHNDMDSLRETLENITAKYKKAKNLRRYIVIEAVYQNSGEIAPLDEIIKLKEKYRFRVLLDESNSLGVLGSSGRGLTEYCGVPVEKIDIITASMGHALATEGGFCTGSTRVIDHQRLSSSGYVFSASLPPYLASAAITAIDVLEENPNLIKKLKKNIAFLRKGLSKIPGITITSNPESPIVYLRLEKSRGSMKDDLHLLENIAERVLKEESVFVVVSKRSTLDKCRLPVGIRLFVSAGHSESDLLKASESLKRVVASVLGGQN

SEQ ID NO: 277417 - protein, 95 aa, Glycine max
  Clone ID: PAT_MRT3847_92530C.1.pep
NGNISVIPRSNNASPIVGLKRSSPMVSLPPKPWSHRRFKCLLLLRFHCECQYIIPFPINFGMGLAIQKCALDVAAVDPLCFKGHNLGYDDEVQKC

SEQ ID NO: 277418 - protein, 47 aa, Glycine max
  unsure (1)..(47): unsure at all Xaa locations
  Clone ID: PAT_MRT3847_92531C.1.pep
KPSLNAACIQGTEYTYNRQHLLEPEITTAPHGDSYITPAXLYSRMTI

SEQ ID NO: 277419 - protein, 53 aa, Glycine max
  Clone ID: PAT_MRT3847_92532C.1.pep
YKYYTPQIYLYALARRQTGRSSAASRVIRLFLWLRFLFYVQRQYNTIHQEVFS

SEQ ID NO: 277420 - protein, 186 aa, Glycine max
  Clone ID: PAT_MRT3847_92533C.1.pep
GGGDGRQYIRRYYCEGRHVGGMEQKKAKIVAELQAVKHNSGKSYNQLAEETGLTNVYVAQLLRRQAQLNPQTAPLLRAALPDLPQDLVSEMMRPPLRSYDPNLIQDPTVYRLNEAVMHFGESIKEIINEEFGDGIMSAIDFYCSVDKIKGVDGKDRVVLTFDGKYLPHSEQKSEHMVSRTRPLGKQ

SEQ ID NO: 277421 - protein, 73 aa, Glycine max
  unsure (1)..(73): unsure at all Xaa locations
  Clone ID: PAT_MRT3847_92534C.1.pep
FPMSNNNLGGGSPPSVQKGKAIKFSGXISGFPEKNVPGTVHCEVVLAPDTMEAVESVPEFIRYPTCQLSHVSR

SEQ ID NO: 277422 - protein, 118 aa, Glycine max
  Clone ID: PAT_MRT3847_92535C.1.pep
HSFFKMNKVGFVFLLVITQIILLQAMALESEAPMPGLNPLEVKIQREVKVSDQKRDKVVVQPVAGSRGSSSSHEEGESKAEEAEAPSIRKLGKHHSADKSVAGGSVILGGLVTVTFAA

SEQ ID NO: 277423 - protein, 195 aa, Glycine max
  Clone ID: PAT_MRT3847_92536C.1.pep
RINTRKRNLIGYTLFSISTLLVLVLDLATSGKGGIGPYIGLCALSACFGVADAHVQGGMVGDLSFMCPEFIQSFFAGLAASGALASGLRLLTKVGFEKSDHGLRKGAMLFFAISTLFEFFCVILYAIYFPKLSIVKYYRSKAASEGSKTVSADLAAAGIHNDTNLQVGFDAKQQERLSNKQLILQNMDYAADLFL

SEQ ID NO: 277424 - protein, 115 aa, Glycine max
  Clone ID: PAT_MRT3847_92537C.1.pep
MSHDEVVLLDAWGSMFGMRAWIALEEKGVKYEHKMEDLNNKSSLLMQMNPIYKQIPVLIHNGKPISESAIIVQYIYEVWNDNKAPILPSDPYERAQARFWVDYIDKKVRRSWFNV

SEQ ID NO: 277425 - protein, 132 aa, Glycine max
  unsure (1)..(132): unsure at all Xaa locations
  Clone ID: PAT_MRT3847_92538C.1.pep
LNLGLAPFAEFEAFAPFAFGSDKAPPNPLARGPRLGGLVXQSPSGPFSGEGPIIPFFSGADGFLVSFEIGPVREFFGGVRGFFTPNYPPFQGIFFFSQPFPGGAEVPFKGAFPGPMGLFFFPGPGEKNWFFL

SEQ ID NO: 277426 - protein, 54 aa, Glycine max
  Clone ID: PAT_MRT3847_92539C.1.pep
FYYPQVPKPSPFKHSLSMVVVEDRLLKNNIHIKIAIRKNQACLITACQTTQSRR

SEQ ID NO: 277427 - protein, 79 aa, Glycine max
  Clone ID: PAT_MRT3847_9253C.1.pep
LFVQLHTHTHALVLYLAGTKHLLWILLSAHAPIMLWHEHCGTELIEGTTYMRFIVSSMSLHDSLVMLLDEWEADVILFG

SEQ ID NO: 277428 - protein, 71 aa, Glycine max
  Clone ID: PAT_MRT3847_92540C.1.pep
TQTRSLQCLISSPRVLLVLPLTHRHCPWGYPFHLTKDRHHQDIQLYMPYNVSAMEKASLVLLEIMVLGFTY

SEQ ID NO: 277429 - protein, 57 aa, Glycine max
  Clone ID: PAT_MRT3847_92541C.1.pep
MESLLHYISRFTVCTSQILQKKVKYLFFFKMNSNYKQKSRNILPKSCLPHSGIILCS

SEQ ID NO: 277430 - protein, 209 aa, Glycine max
  Clone ID: PAT_MRT3847_92542C.1.pep
RVRLLYNYIQSHYWGVGFLRYFQLKQLPNFLLASPMRPLALCSVVHYAKSRPQNFLSLGFLAPMEEKSRGVVFLLDELSRSKEARSVKKSSVRVEAEHSNLRRRKNVSKGDAANVHLESEPAAIWPGYLSASVLPFVLHLGFMACTAFFIMHVQVSTRFLSASPPLYWFASYIMAYPGKYSRWGYVMWAYSIAYIFLGSLLFSNFYPFT

SEQ ID NO: 277431 - protein, 59 aa, Glycine max
  Clone ID: PAT_MRT3847_92543C.1.pep
TKTFMLPCFLIREHIFFPRGFFQGPKKIDLGGFFEFPFRSPKKIDHHFCFCFAQVNLYP

SEQ ID NO: 277432 - protein, 582 aa, Glycine max
  unsure (1)..(582): unsure at all Xaa locations
  Clone ID: PAT_MRT3847_92544C.1.pep
MNDIIACAAAAANSSLPTSVLGVLHFLHSRGRSSSCVHTPSELLRDFATREFNAFLWLCLVAVTTLLLRRLFNLFRLWHRAKTIPGPPSPSFFGHCKLFSRQNFTFTDVLSESHQKYGPIVKLWLGPTQLLVSVTDPALIQEMLIKAKDKLPFTGKVFHLAFGESSLFAPSFEKVQKRRELLANELHERLLKSDDVIPMKVADFITDKIENIRTKRGINSRLVSQHMAFTIMGATFFGDGFLASPKAAIYEELFMMIAKDACFWASYNVTPFWRHEFWRYQCLCTKLKCLTQDILQHFRKGCKLFGQTDQDVRNESSNKETKSADGAQCCSGDDFQDYFFFRDLKDHQDGKEEPCGNIMRVIFHGCQTTSALITNVLTRLVMHLEIQDKVYSEISIVGRNPSKYEHENVYRMPLLLXATIYESARLLPTGPMLQRCSLKHDLCFATGLTIPAGAVLVVPVELVHKDDSSWGSDASDFNPYHFLSTGTKGSGSTEDLSITGVSSCVLNDPNENAAFLPFGSGTRACIGQKFIIQLVASVLASLLKKYELRLNSGSDEDSNTTLKNNLHQHHPNSQILFVKRDQ

SEQ ID NO: 277433 - protein, 167 aa, Glycine max
  Clone ID: PAT_MRT3847_92545C.1.pep
MNAVRRRLLHTLRSDAPSGTLKRRALELEKKRKTRHSKSKDQFIVTVPESLSYLDTATIPMYFAAIGIALFAKLLMTYDDSRSQELLERKIKNAPEGQGSVRMLTREEWEEYREVRPRTPFESTLARPNSRIRTGESLRLEDVKDWTTDVLMDALHRVEEYGKHGSK

SEQ ID NO: 277434 - protein, 55 aa, Glycine max
  Clone ID: PAT_MRT3847_92546C.1.pep
VGHLGTQCTDPIFIHVQVISLERKVYWSVPQLFLLSFLPRFLLCLVGRMPNARIA

SEQ ID NO: 277435 - protein, 96 aa, Glycine max
  unsure (1)..(96): unsure at all Xaa locations
  Clone ID: PAT_MRT3847_92547C.1.pep
HPIHXXPTIPTTLXXLTXXXXXYXPTKYSHPLSILTHXXXFXTLXYXXIFFNIQKPPFXFYPTNILHXYNLPXITFIIYSIXXPXXPLLKNIPTFT

SEQ ID NO: 277436 - protein, 47 aa, Glycine max
  unsure (1)..(47): unsure at all Xaa locations
  Clone ID: PAT_MRT3847_92548C.1.pep
XQXCCKXXYKRRXXXVXRNHKDXSXXGXVXWSXXRAEXXAHARAXAA

SEQ ID NO: 277437 - protein, 103 aa, Glycine max
  Clone ID: PAT_MRT3847_92549C.1.pep
SYLLSIIESSIGSSYSSFVPSTKGMQTVDKGRRKYSNLCTLESTQHKLHDNFIFLYFINNLLSIFWKSIPPHNTTHPFCFINLHQRVRHSQESTSPQPRNFQR

SEQ ID NO: 277438 - protein, 83 aa, Glycine max
  unsure (1)..(83): unsure at all Xaa locations
  Clone ID: PAT_MRT3847_9254C.1.pep
XKKKFSPPRLFFLESFSPLPGGNSSQGKVPPSPSFYLLKKKLVREKKGDSWVFGAKNFVSGPIFNFFTLGGFFKNPFGNWALT

SEQ ID NO: 277439 - protein, 49 aa, Glycine max
  unsure (1)..(49): unsure at all Xaa locations
  Clone ID: PAT_MRT3847_92550C.1.pep
HDARRYDSSRSAGTGPAPYTYVPYGGGPSMYPGKEYAXRMEHMVIMHNL

SEQ ID NO: 277440 - protein, 149 aa, Glycine max
  Clone ID: PAT_MRT3847_92551C.1.pep
MKSTMAGRVRSCLNPHAASFVPLFKRDDDEAPPQPHQHQHILESSLQLKKTNPSPPPQLDVTELIEEDADLDIELLKIMFPDFAEQSLRDVYFVNYADLNAAIDMLDHLKFDCDESSKTLDIGSVSESAPSAGSGSPKLNNTAAKASAS

SEQ ID NO: 277441 - protein, 94 aa, Glycine max
  Clone ID: PAT_MRT3847_92552C.1.pep
IYLPCHTTPNLSFIKTPQLPRENRNNVVSLLACSQPHCFFIPLAPLFFHVLLEESPQLKPWEKIKVIEEEGLLQGDGHHNGLLRRCYFLVFVGG

SEQ ID NO: 277442 - protein, 460 aa, Glycine max
  unsure (1)..(460): unsure at all Xaa locations
  Clone ID: PAT_MRT3847_92553C.1.pep
MAKKKSWFSLVKRLFIWDTHSTQDKKEKRRKWIFGRLKSKRIPSIKAPLPSKETILSEAEEEQSKHALTVAIASAAAAEAAVTVAHAAAEVVRLTGQRKENSEESQPVKTRNGAPQSTYQCQREIKESAAAIKIQTAFRGYLAKKALRALKGIVKLQAIIRGRAVRRQAMSTLKCLQSIVSIQSQVCAMKMEMDKKRLGYSENELMKATKDXIIVVLVTAKRKLXSSLLKALLGRDKYHQQDRRSKRIIIDPRKAHILSNXKVNGRWRYWQEKLVDTQLSKSKELEDLDSVFSSHSRAGEEYGGRQLKLRSNIQRQNPVEGLDSPILGSRRSFPHRRQCSVGEDHSFLSSPATPAYMAATESAKAKARSTSSPKIRTGGNVDMNSDSYSPCKKKLSIASSINSEMLSNGRVGKLSVNQQQRSPSFKGLSVPIKSSRTTIKDLSINSDCSLPNWDRQAFFK

SEQ ID NO: 277443 - protein, 241 aa, Glycine max
  Clone ID: PAT_MRT3847_92554C.1.pep
ESQPVKTRNGAPQSTYQCQREIKESAAAIKIQTAFRGYLAKKALRALKGIVKLQAIIRGRAVRRQAMSTLKCLQSIVSIQSQVCARRLQMVEGRCDYSENEDMQDSKDKIIRMDSNSERKWDESTVLKEEVDTSCTSKKETILKRERIKEYSFNHRRSAESERSKVNGRWRYWLEQWVDTQLSKSKELEDLASVFSSHSAGEEYGGRQLKLTSINNQRQSSWWILLHLFGSFLISSFWTRL

SEQ ID NO: 277444 - protein, 87 aa, Glycine max
  Clone ID: PAT_MRT3847_92555C.1.pep
MAFCPIFCCGNGSDRKGRGKKQPPWRVFSLKELHSATNNFNYDNKLGEGGFGSVYWGQLWDGSQVGPYFAFLFFVHLTKSALVYGYS

SEQ ID NO: 277445 - protein, 422 aa, Glycine max
  Clone ID: PAT_MRT3847_92556C.1.pep
MAENASIELNKFVFFCLLVLIQVAVSEIIFEERFDDGWRGRWVKSDWKSSEGKAGSFKHTAGKWAGDPDDKGIQTSSDAKHFAISAKIPEFTNKNRTLVLQYSVKFEQEIECGGGYIKLLSGFVNQKKFGGDTPYILMFGPDLCGTDTKKLHVILSYHGQNYPIKKDLQCETDRLTHFYTFILRPDATYSVLVDNRERDSGSMYTDWDILPPRKIKDVKAKKPKDWEEREYIEDPNDVKPEGYDSIPREIPDPNAKEPENWDEEEDGKWKPPKIPNPAYKGPWKRKKIKNPNYKGKWKTPWIDNPEFEDDPDLYVLKPIKYVGIEVWQVKGGSVFDNVLICDDPDYAKQVVEEVFANREIEKEGFEEAEKVRKAKEEEEAQRAREEGEKRRRERGHDRRYRDKYRDKYRRHRHHDYDDHDEL

SEQ ID NO: 277446 - protein, 94 aa, Glycine max
  Clone ID: PAT_MRT3847_92557C.1.pep
YSTYISLSLSEKNTLPHRNRKSVSISVERTAFLNITLLPCFNYLTFSVTKRLQRRIYGHTLLDMIATNQRQAQSLSSWVPRHSHGGGTCATTRS

SEQ ID NO: 277447 - protein, 131 aa, Glycine max
  unsure (1)..(131): unsure at all Xaa locations
  Clone ID: PAT_MRT3847_92558C.1.pep
NKIGAIKIAWGSLANYMFPLLMNTGYGARSLVVKCASXRLAAEAHNIFGYKTIPEPSVKATKEYILGXHYISDYKTVHQQAYFYAIDLKVHSKDTFVININGTVLSNILYYIYHFYCVLNINSIFYDQCFN

SEQ ID NO: 277448 - protein, 89 aa, Glycine max
  unsure (1)..(89): unsure at all Xaa locations
  Clone ID: PAT_MRT3847_92559C.1.pep
NHDDQIEFLIMLSELGTRPMLGGNEGSFGDELEKEXGMLLREQRRQEVDDRERELNLYRSGSAPPTVEGSLSAVGGLFGGRGRWRWHRR

SEQ ID NO: 277449 - protein, 60 aa, Glycine max
  Clone ID: PAT_MRT3847_9255C.1.pep
ISCPAVTTVNRACAGMVASLTGLTYIAAFLTRKTNNDISCIARIGGRTQCMLVWPLAGVK

SEQ ID NO: 277450 - protein, 47 aa, Glycine max
  Clone ID: PAT_MRT3847_92560C.1.pep
DIGPLFNQSFFLNCILTFNHRGTWTTNAEVKPCCLPDEDLYAFTGQY

SEQ ID NO: 277451 - protein, 60 aa, Glycine max
  unsure (1)..(60): unsure at all Xaa locations
  Clone ID: PAT_MRT3847_92561C.1.pep
AHVHIIHLCDPSACLDLIHESKSHERQHTCSDLGXYLAFTSVEIPNDDTRYKCSPPIRDA

SEQ ID NO: 277452 - protein, 98 aa, Glycine max
  Clone ID: PAT_MRT3847_92562C.1.pep
ETHPHISPTWKSKLEAHTHTQWPPFMLQRDHFSSPIQPNASSVPSNPLLLPSLSTAPQKPPAAPSTSTSPHLPPSATITTSSVSSKSVVWSSPSPATR

SEQ ID NO: 277453 - protein, 76 aa, Glycine max
  Clone ID: PAT_MRT3847_92563C.1.pep
MAVVKNKRISKGKKGGKTNAADPFAKKDADDINAPSVFQEKNVGKTLVSRTAGTRIALEGLKHSVSDVSWADLHGV

SEQ ID NO: 277454 - protein, 197 aa, Glycine max
  Clone ID: PAT_MRT3847_92564C.1.pep
MEVPKDQIATLLEHGLYNSAQMLGCFLVSSPAVNAESAPHLKTESLVLLGDSFFREREYRRAIHTYKQALQCYKMIPKQNMTSSRSSLSSNRSSSPNSCNGSVINENEVKFKIASCHSFLNENKAAPGVREGIPSKARNLPMNLLLGRLYRISRHSRAAVAIYKECLRHCPYVLEAITALAELGSTAKDIISLIPQV

SEQ ID NO: 277455 - protein, 96 aa, Glycine max
  Clone ID: PAT_MRT3847_92565C.1.pep
MNRGESSGGGQSSLGYLFGSEEKPNQPLPTRTAPLPPYGIDIDNSMPHHGSNCQLVVSNNRSQGHHLGNIVTDRPSTKVKSVPGGHSSLGYLFGDK

SEQ ID NO: 277456 - protein, 44 aa, Glycine max
  Clone ID: PAT_MRT3847_92566C.1.pep
LFLFLQIIFFSDTTKNGLGLTINLTYKSSRYLSKGQLHPNTGRG

SEQ ID NO: 277457 - protein, 162 aa, Glycine max
  unsure (1)..(162): unsure at all Xaa locations
  Clone ID: PAT_MRT3847_92567C.1.pep
FVLNHNFKVTVLAVTSQTSRAETQILNSALTPSLCNVINIPSPDLTGLIHQNDRMLTRLCVMMRQALPTIXSILSEITPRPSALIVDIFGTEAIPIGRKLNIPNYVYVASQAWFLSLLVYSPILDEKIEGEYVDQKEALKIPGCNPGRPGDVVDQMLDRTTE

SEQ ID NO: 277458 - protein, 166 aa, Glycine max
  unsure (1)..(166): unsure at all Xaa locations
  Clone ID: PAT_MRT3847_92568C.1.pep
IFPTDGEHXLNLPPPKFIXVSXSAWLTYEQFPRQMLAALNPILMSXLKDFPSRSTLHSQFYCDHPGSDYSYHLLRALLLNGSLNMTAVLNXILHRLDHHDPFMPSFKPLXASSTHAYATTPILSLKNDPTSKPLAIQERXPHSQGDQSVAFDHLLLLAQERVDCSL

SEQ ID NO: 277459 - protein, 71 aa, Glycine max
  Clone ID: PAT_MRT3847_92569C.1.pep
HTHVAHHWVSTLPHYHAMEATYAMQPIWGEYYRDDETPCVNAPRTEARECMHVEPDQSTESKCVFWCSNKL

SEQ ID NO: 277460 - protein, 93 aa, Glycine max
  Clone ID: PAT_MRT3847_9256C.1.pep
KRRVPKNIKNGGWPPKIWGGQYLGPLSSKLRGPQKWGHSPGGFYPLQRGFCFRGGPPSLGKGVFFVFQPAPKIKGGVKGCSKDKQNHFLRAVF

SEQ ID NO: 277461 - protein, 192 aa, Glycine max
  Clone ID: PAT_MRT3847_92570C.1.pep
LLRLHSTYRHDLKIYSSDEGRVQMSAAAFAKGLLDLEGQLTPILVSLVSKDYSMLDGLENASSEMKEAKAWLNEIITSNANTVDSNGSPEFPWMVDGAGLPPNASELLANLVKLTKKVTKQVRLLAQDENEKLAERSLYDVIPPYDQATALGKTNIDVDRIAAGLPCGSEGFLLMYARWKKLETDLYNERKD

SEQ ID NO: 277462 - protein, 61 aa, Glycine max
  Clone ID: PAT_MRT3847_92571C.1.pep
HQFYPVGKSGIGIPNDTIVLTKFHGFSFLFFSIGGNVKFCITHSCFSNRLDYYCFDKKKNK

SEQ ID NO: 277463 - protein, 126 aa, Glycine max
  unsure (1)..(126): unsure at all Xaa locations
  Clone ID: PAT_MRT3847_92572C.1.pep
MDLELPAHAATVNESQQQKFALPVDSENKATVFRLFSFAKPHMRAFHLSWVSFFACFVSSFAAPPLLPIIRDNLNLTATDIGNAGVASVSGAVFARIAMGTACDLVGPRLASASLIXLTAPFVYFT

SEQ ID NO: 277464 - protein, 169 aa, Glycine max
  Clone ID: PAT_MRT3847_92573C.1.pep
MNLNHHDAPPYEHMLKESINRFFAEHRRGATDFADFTSIFSRMLHSTPEPPLPLLWFYAALEFRATREPSRRARDLFHLLASCSGARGSTKRIAALAPLLFVLHRSVLLRGEELLLKSEVEGLVEGVVSYCSICCGNEICREDDVAVLEFGDLVKVWTVDDDEDYNEGG

SEQ ID NO: 277465 - protein, 72 aa, Glycine max
  Clone ID: PAT_MRT3847_92574C.1.pep
AVAFAFSLCPRGFLCLVFRFFISLLIYIWYFGYILIFSLPQPYLVAYFLLHKSRLLIGSSPPPPPKKEDVIQ

SEQ ID NO: 277466 - protein, 60 aa, Glycine max
  unsure (1)..(60): unsure at all Xaa locations
  Clone ID: PAT_MRT3847_92575C.1.pep
IPIPISNNNMYRTLSLFXAGPLVVCDALACIRTYYINTARARKLLQVKKKKNQNHSIGRG

SEQ ID NO: 277467 - protein, 75 aa, Glycine max
  unsure (1)..(75): unsure at all Xaa locations
  Clone ID: PAT_MRT3847_92576C.1.pep
VCESAXXXXSKVNVCFEVLYDSSFMRFGNGESHLLPTPPSLLTFSEDKSLSMPSLPANHHIITQSILLHIIMVIL

SEQ ID NO: 277468 - protein, 60 aa, Glycine max
  Clone ID: PAT_MRT3847_92577C.1.pep
KKTSIQGTLILVLCSVLHQFMVHTLRSVGQARKGCLSKLSPSVSQSNCKELVDAFHMLGL

SEQ ID NO: 277469 - protein, 81 aa, Glycine max
  unsure (1)..(81): unsure at all Xaa locations
  Clone ID: PAT_MRT3847_92578C.1.pep
FHPCFVSCFSSHSTASLMVHGSSFHIISALDAFKSQMVAKVVLVCDLKSRSTYSVAALPIGRAALPMCDKLXFYPXIPRTP

SEQ ID NO: 277470 - protein, 49 aa, Glycine max
  Clone ID: PAT_MRT3847_92579C.1.pep
EGATLHYNECRPRDEFLIEMPTVPYDLKKWEYAFVWRIKHGAPLPCLPY

SEQ ID NO: 277471 - protein, 33 aa, Glycine max
  Clone ID: PAT_MRT3847_9257C.1.pep
FQLKKLHIHKSNEPKFCPFFNLLRHMNNEAYWN

SEQ ID NO: 277472 - protein, 29 aa, Glycine max
  Clone ID: PAT_MRT3847_92580C.1.pep
YKGIHNHPCEKLMETLTPLLKQIQFLASL

SEQ ID NO: 277473 - protein, 142 aa, Glycine max
  unsure (1)..(142): unsure at all Xaa locations
  Clone ID: PAT_MRT3847_92581C.1.pep
RGPKKHLKRLXNPKAWMLDKLGGVFAPRPSTGPHKLRESLPLVIFLRNRLKYALTNCEVKKIVMQRLIKVDGKVRTDPNYPAGFMDVISIEKTNENFRLIYDVKGRFTIHRITADEAKYKLCKVKRVQVGPRGIPFLVSHDG

SEQ ID NO: 277474 - protein, 67 aa, Glycine max
  Clone ID: PAT_MRT3847_92582C.1.pep
LERPHFIRELLNLTCVTPSWVNGVRFAAQCRFVPIIVYISYLISQSVNYSSTAINIIRTELVTSIPL

SEQ ID NO: 277475 - protein, 176 aa, Glycine max
  Clone ID: PAT_MRT3847_92583C.1.pep
MDVKAAPRLQLSAVVQPESIGRRPPSTCRLGVSREPQSLRVFVSSTMMRRRTTALEVSCSYGNISASILESGSVRAPLDEELILKNRSQEIQPYLNGRCIYLVGMMGSGKTTVGKIMSQVLGYSFCDSDALVEEEVGGNSVADIFKQHGETFFRNKEHPRCHPSSYYLYVISSGGA

SEQ ID NO: 277476 - protein, 130 aa, Glycine max
  Clone ID: PAT_MRT3847_92584C.1.pep
MDVKAAQRLQLSAVVQPERFGRRPPFSTCRLGVSREPQSLRVFVSPMMMRRRTTALEVSSSYDNISASILESGSVHAPLDEELILKNRSQETQPYLNGRCIYLVGMMGSGKTTVRKIMSQVLGIHYVIVM

SEQ ID NO: 277477 - protein, 122 aa, Glycine max
  Clone ID: PAT_MRT3847_92585C.1.pep
MASFLQSFLDPKKNWFAAQHMKSLSKRLRKYGLRYDDLYDPYYDLDVKEALNRLPKEVVDARHARLKRAIDLSMKHEYLPDNLQSMQTPFRGYLQDMLTLVKRERAEREALGGLPLYQRSIP

SEQ ID NO: 277478 - protein, 53 aa, Glycine max
  unsure (1)..(53): unsure at all Xaa locations
  Clone ID: PAT_MRT3847_92586C.1.pep
RNKWKNHKSNGKAAKLGRVEAMSACXXWWIXDIQINEPASQGWLIHVMRFFVC

SEQ ID NO: 277479 - protein, 68 aa, Glycine max
  Clone ID: PAT_MRT3847_92587C.1.pep
LSWYPVPMCMITVLKDCSLELVMLVRGSPRWIHFIGVGQIGFNAVLSMSGSLRERLIFKDKPYSRGKV

SEQ ID NO: 277480 - protein, 129 aa, Glycine max
  Clone ID: PAT_MRT3847_92588C.1.pep
VEILPRGPQSIVSNLGIHIHRPRPLLGDPVLLIGLPTILPPIPTKAGHFLPSPSVSGPPRFKFPIYWGFLTVPRLTFLFLLQLYEGITLYPHVLPMPPLESLNPYRNFFTSAFIFVFPPPPPKASWHYS

SEQ ID NO: 277481 - protein, 67 aa, Glycine max
  Clone ID: PAT_MRT3847_92589C.1.pep
PVQKTERKLHAKEVARSLDITKYDGIVCVSEDGILVEVSFIAITLVALFVIIILIVIVMFVVINTKQ

SEQ ID NO: 277482 - protein, 142 aa, Glycine max
  unsure (1)..(142): unsure at all Xaa locations
  Clone ID: PAT_MRT3847_9258C.1.pep
EHCYACKWAKSXPHSWELIFPIEICGPNNGYEMWSFEWANLSSWHLSFLIANPKQFTVFDILLGISQHFESAGNTLRPAFFAPQATGRSFENSESSAWYAICVFFRLFVSLIQQRKLGRPLLWSMLCLSENFHSSFNCRNDV

SEQ ID NO: 277483 - protein, 52 aa, Glycine max
  unsure (1)..(52): unsure at all Xaa locations
  Clone ID: PAT_MRT3847_92590C.1.pep
EDFFSVDNVIRVLQDIPGGDDDLILDAXDFWQDDPRGSMFLALPAPKRKKWL

SEQ ID NO: 277484 - protein, 65 aa, Glycine max
  Clone ID: PAT_MRT3847_92591C.1.pep
MVTKSKMSCAFTADFESEDVTHRSRVTILPCSFRRREHLVRMTLLCYHQCSSDDFRGPYMSLQWL

SEQ ID NO: 277485 - protein, 135 aa, Glycine max
  Clone ID: PAT_MRT3847_92592C.1.pep
LSFSRWCDDDGRIHLDQQLGNEDAGVEDDSDFELPFPEKNELLSRSLDRERFFHQKFQLRNMQMNGIGTMDDDSVHRRGNGSEKYVSFDIEDKSERGTKGVDSYISVGGDGSLGKSFQNPIHAANILKTLFLILM

SEQ ID NO: 277486 - protein, 122 aa, Glycine max
  Clone ID: PAT_MRT3847_92593C.1.pep
NEADPRMRAASKRRGILITFISRPIKPSDFVDFDLILAMAKQNKEDILEAFNRWKGRHSLPDDSHKKVKLMCSYCKKHDESEVPDPYYGGHQGFEKVLDLLENACGSLLETILAENKHVQES

SEQ ID NO: 277487 - protein, 240 aa, Glycine max
  Clone ID: PAT_MRT3847_92594C.1.pep
MSVINLRFCHCSQLLLLSPNPKLSSSSQTAKLTLRKKNPTTPFAISCKTRFSSSIRASMASPSITDAETKPFSVLFVCLGNICRSPAAEGVFTDLVNKRDLNSKFKIDSAGTINYHEGNEADSRMRAASKRRGIQITSISRPIKPSDFVDFDLILAMDKQNREDIFEAFNRWKDRHSLPDGAHKKVKLMCSYCKKHDESEVPDPYYGGPQGFEKVLDLLEDACGSLLETILAENKHVQQS

SEQ ID NO: 277488 - protein, 423 aa, Glycine max
  unsure (1)..(423): unsure at all Xaa locations
  Clone ID: PAT_MRT3847_92595C.1.pep
MTTMGPTIFPLPFPLKKLVLQRLPNLENVWNDDPHRILRMQLLQQVHVEKCENLTSVFLATVAKDIVKLTAARRRQKGGLMAIVAEDNADPNGTNLELTFLCLTSLTICDLPELKCFLQCDMLKTFSHVEPNTKNQICIEKLTPNLQHLTLGENELKMIPHGEFPGNVLHNLKALILLNFSVESYEFAYGFLQQVPNIEKLEVYCSSFKEIFCFQSPNVDDTGLLSQLKVLSLESLSELQTIGFENTLIEPFLRNLETLDVSSCSVLRNLAPSPICFPNLMCLFVFECHGVGKLVHILXAKSLSRLQIMEIRSCESIKELVSKEGDGSNEDEIIFRQLLYLNLESLPNLTSFYTGRLSFPSLLQLSVINCHCLETLSAGTIDADKLYGVKFQKKSEAITLDIDLNSTIRNAFQATVPDASSAP

SEQ ID NO: 277489 - protein, 80 aa, Glycine max
  Clone ID: PAT_MRT3847_92596C.1.pep
SKAQLTIIFCSVLCFVGCRKYFPLHLSLVTVHSSMVQLDPKRFDLLCRCISIGNIVLFIARFLVKKVWKRSRSLKLRGRV

SEQ ID NO: 277490 - protein, 78 aa, Glycine max
  Clone ID: PAT_MRT3847_92597C.1.pep
QCSLVGGLKRFMVFVLLTFIVCGEKEEPSVVVDQHYQPHNMTEKQEKPNQHLNPRYPFGVYFSQKRKVPNASDPLHNR

SEQ ID NO: 277491 - protein, 36 aa, Glycine max
  unsure (1)..(36): unsure at all Xaa locations
  Clone ID: PAT_MRT3847_92598C.1.pep
RSLRQRHWYIHSTCATSREGLXEGLYGLSHNFANKA

SEQ ID NO: 277492 - protein, 100 aa, Glycine max
  Clone ID: PAT_MRT3847_92599C.1.pep
SSSTATLVTSSLVVIMLMLNVDEPTMVSGTPPCASTVFLLLMLLLHFLNKPMFPTSCCSSIVHIRPSIATPYHNPQSLSLPSFVSAPHCSIITLVPFTSN

SEQ ID NO: 277493 - protein, 360 aa, Glycine max
  Clone ID: PAT_MRT3847_9259C.1.pep
MEERENKEIKIARFSSCRGVAFEINPNRSNPFAIGSPPKQERIGTWLWLPWTRNSSFKVLPQPHTISPTRSRASSHFCDIDIDASDFEVEFIAEVQDIEKPDKANVVKVQKLLPKSDPPRRSRLSIILLDQGFTCYKGLFLVCMALNVVALALSAAGCFPYAKTRAALFSIGNILALTLCRSEAALRVIFWLTVQTLGRPCVSLRIKTATTSFLQSVGGIHSGCGVSSIAWLAYSLVLTLKNKDKTSPEIIGVAFTILSLILLSSFAAFPLIRHLHHNVFERIHRFAGWMALILLWLFILLSISYEPYSHTYDLTMSKVVKKQECWFTLAITILIIIPWLSVRKVQVNVSSASSHASIIK

SEQ ID NO: 277494 - protein, 171 aa, Glycine max
  Clone ID: PAT_MRT3847_925C.1.pep
WNSMIAGMMLNKESERAVDMFQRLESEGLKPDSATWNSMISGFAQLGECGEAFKYFGQMQSVGVAPCLKIVTSLLSACADSSMLQHGKEIHGLSLRTDINRDDFLVTALVDMYMKCGLASWARGVFDQYDAKPDDPAFWNAMIGGYGRNGDYESAFEIFDEMLEEMVRPNS

SEQ ID NO: 277495 - protein, 61 aa, Glycine max
  Clone ID: PAT_MRT3847_92600C.1.pep
IFARDNVDFIEFFSYFRQFYSFFLIIKNILITNNKKDNKDSLEYDKIPNNRTKQDSLVIYV

SEQ ID NO: 277496 - protein, 200 aa, Glycine max
  Clone ID: PAT_MRT3847_92601C.1.pep
MKMVTAFNGNMKKAAAGLRRINLDGLRWRVFDAKGQVLGRLASQIATVVQGKDKPTYTPNRDDGDMCIVLNAKDICVTGRKLTDKVYYWHTGYIGHLKQRTLKDQMAKDPTEVIRKAVLRMLPRNKLRDDRDRKLRIFPGSEHPFVDRPLEPYVMPPRSVREMRPRARRAMIRAQKKAEQQQQKADGMKGKNGEAQEESA

SEQ ID NO: 277497 - protein, 100 aa, Glycine max
  Clone ID: PAT_MRT3847_92602C.1.pep
NRTGYFTTNYGDHTHNSFFIHKQTNIIKLGHFVFFSVGTGPLNLVISSNHFLFIESISSNSNIGVIALARNAYRFCMAEVRSVSNGIKNPSNWISWLHSK

SEQ ID NO: 277498 - protein, 82 aa, Glycine max
  Clone ID: PAT_MRT3847_92603C.1.pep
SKSKFKIQTTSISTVKIFHQTAQRLLRTKRGNKREPWSLTIKISLTNSCSSKTNSLHSSSSSAPTQGKMREILHVQGGQCGN

SEQ ID NO: 277499 - protein, 345 aa, Glycine max
  unsure (1)..(345): unsure at all Xaa locations
  Clone ID: PAT_MRT3847_92604C.1.pep
MEPTGPDSFVKKGENSAEKVSELSLEKGEEVAKASHESLVSDAKWVCESPKAGVSSTASGWPSFNDIKAPPLTYSLSAEEKATVAVLQLQHKALEACQKFLVGDAGSDGDEDDKDDEDEDELVDDYDSKECEEYKFFEKVFAEDGDLRRYYESNHKEGDFHCLVCGGIGKKASERFKNCKTLIHHSTAILRTKRKRAHRAYAQVICKVFGWDIDQLPAIVLKDLDSSLASSGWPSFDDIKSCSLTYCLSAEEKATVAVLQLQHKALEACRKFLVGDAGSDGDEDNNDYAECEEYKFFEKLFAEDGDLRRYYESNHKEGDFYCLVCGSIGKKVWKRFKXCVGLIYH

SEQ ID NO: 277500 - protein, 137 aa, Glycine max
  unsure (1)..(137): unsure at all Xaa locations
  Clone ID: PAT_MRT3847_92605C.1.pep
AREREGEEFERALGLLTLAPKRIGNKINRNAILCTRRSRLLKKAYELSVLCDXAELAPIISLQSQESSYDFRSGSSMLNTRERCQKCTYGPPEDNXVATKAALLLESSTQQEYLGLQALYRTLLLAYRHLMGEDLGP

SEQ ID NO: 277501 - protein, 77 aa, Glycine max
  Clone ID: PAT_MRT3847_92606C.1.pep
LNKEKKNSNSYRNKEASMFIKNVEGEFLEEVRSHFLWLRDRHNKETNNSNFIYKQVASFVLKNVELEFPQRSPISIP

SEQ ID NO: 277502 - protein, 60 aa, Glycine max
  Clone ID: PAT_MRT3847_92607C.1.pep
VRHMRGWRPCRCSRCQPTCVSSMKGQGSRARRGYMVAYVHPDTVASRRCVDQASSRSTRF

SEQ ID NO: 277503 - protein, 94 aa, Glycine max
  Clone ID: PAT_MRT3847_92608C.1.pep
ETPSLFKNGGTVGSSSLPGIGKPRKGRMPNRTHPLFTQVVLQDGAMTSLSKGYLNLSRQVVSVILCGTLEVAIYANSQSGAIKGEVSIKAQYCN

SEQ ID NO: 277504 - protein, 69 aa, Glycine max
  Clone ID: PAT_MRT3847_92609C.1.pep
LPILTPTHTPVATPPRRADAYVHTPVLTADSPVTVIFTIVTNYCFCFVIPTSITGYFQHLSLDHHYSLI

SEQ ID NO: 277505 - protein, 134 aa, Glycine max
  unsure (1)..(134): unsure at all Xaa locations
  Clone ID: PAT_MRT3847_9260C.1.pep
MATARTPLNFDSSTQSFXQFSIDLLDGGILVDKTGDWITLIQNSPIRNLVRVADWKTGCLMVNIVMPGNATVKRSDXASLGQVFLTYSSCTEHFDACKWSKSEPHSWELIFPIEVXWPNNGFEMWSSEWAYQTS

SEQ ID NO: 277506 - protein, 25 aa, Glycine max
  Clone ID: PAT_MRT3847_92610C.1.pep
MRAKWKKKRMRRLKRKRRKMRQRSK

SEQ ID NO: 277507 - protein, 32 aa, Glycine max
  unsure (1)..(32): unsure at all Xaa locations
  Clone ID: PAT_MRT3847_92611C.1.pep
GISMTTXSXKSXIXEKVYRWTTSHXCXTXDLL

SEQ ID NO: 277508 - protein, 58 aa, Glycine max
  Clone ID: PAT_MRT3847_92612C.1.pep
ITGILHERQSCSSQTITSSKALLPNNYRSLPTQDSNSKPLVNLEDTSTSFFSFLLIIT

SEQ ID NO: 277509 - protein, 98 aa, Glycine max
  unsure (1)..(98): unsure at all Xaa locations
  Clone ID: PAT_MRT3847_92613C.1.pep
XLXXQAVXXPLXTSXXKXXRLXVLDXSRXVXXWRXLRVQELXVXCREXXXXRIXTGXTGSXXPSLLLXXDTRXXLXAXXREXRAEFRAYVRVXATXXX

SEQ ID NO: 277510 - protein, 52 aa, Glycine max
  Clone ID: PAT_MRT3847_92614C.1.pep
KPTFPSQILSMYYIIIDNGPRKSMCLKHLFNVTVSAKSEKASWDPLRLTQLF

SEQ ID NO: 277511 - protein, 54 aa, Glycine max
  unsure (1)..(54): unsure at all Xaa locations
  Clone ID: PAT_MRT3847_92615C.1.pep
XXXXARVRKXGIRLENXXCXSCCXXXXSXLXPRXEQXLTXXTPXXAGSLXXHNA

SEQ ID NO: 277512 - protein, 97 aa, Glycine max
  Clone ID: PAT_MRT3847_92616C.1.pep
MGTALHLCVSFNPAQGRKCKYEAQSVRALPIRILSVGKKRSRGLQLMVDEYVDKLRYYCSVEDVQIRPNPQNARDQRAQVDAEDEAVMNLIRSDDWV

SEQ ID NO: 277513 - protein, 522 aa, Glycine max
  unsure (1)..(522): unsure at all Xaa locations
  Clone ID: PAT_MRT3847_92617C.1.pep
MGSSSASAWTPPCPANAHSLPGAPPRVPNQFTLVSCASVSRFPQLTQVEKLENLKQKQKKETQTELRVSESRRRNVATMGPAAKTTTMRSISQEAFEELVNENIDDLGMDPTEALQDAIQTLTLQGVDLSGIVTCVPGETNPVIECLDRLRHLETEPDQNLIAQAFNTLHELCANPNSDSNSNVAIATKNGAVELACSLCSKISLAAGSHVVPLVSALNALASLLHDVQSTGAFHRCDGPRIVMAFLVDNKGNVELLSSGFRVVASAATGNEIVKEAFMELKVDELILEIMSLHRHKGIQSLYDAVCALLMPDDDRVVASQVSSGCLRMCVHINRETSLWCQLSVYVVAGVHILALFFGCXTLLVFHGCEQGYKNEVKVCCSLLSKLAGSDANKSAIVGKGGMDKLIKLSARFADDPSVLQEIMSIISVLSLRSPDNAARAIEAGAGDLAIQAMEKFPAAHQMQRNSCLMIRNLVVRNPENRTILLNNGIEKYIRKAKQTHTNCKDAATDALRDLGLDNYNL

SEQ ID NO: 277514 - protein, 116 aa, Glycine max
  Clone ID: PAT_MRT3847_92618C.1.pep
MGPAAKTTTMRSISQEAFEELVNENIDDLGMDPTEALQDAIQTLTLQGVDLSGIVTCVPGETNPVIECLDRLRHLETEPDQNLIAQAFNTLHELCANPNSDSNSNVAIATKNGAVE

SEQ ID NO: 277515 - protein, 470 aa, Glycine max
  unsure (1)..(470): unsure at all Xaa locations
  Clone ID: PAT_MRT3847_92619C.1.pep
VRSRVDPASEEDSGEGGLVKVEPKPSNGFTSKVVDLLEKLVVKFLYDSSLPHHYLTGNFAPVSETPPTXDLPVKGYLPDCLNGEFVRVGPNPKFAPVAGYHWFDGDGMIHGLRIKDGKATYVSRFVRTSRLKQEEYFGGSKFMKIGDLKGLFGLLMVNIHMLRTKWKVLDASYGTGTANTALVYHHGKLLALSEADKPYAIKVFEDGDLQTLGMLDYDKRLGHSFTAHPKVDPFTGEMFTFGYAHTPPYITYRVISKDGYMHDPVPITVSDPIMMHDFAITENYAIFLDLPLIFRPKEMVKNKTLIFSFDSTKKARFGVLPRYAKDEKLIRWFELPNCFIFHNANAWEEEDEVVLITCRLQNPNLDLVGGTAKEKLENFSNELYEMRFNMKTGEASQKKLSASAVDFPRVNESYTGRKQRYVYGTTLDSIAKVTGIIKFDLHAEPDNGKTKLEVGENVQGLYDLXPGKYG

SEQ ID NO: 277516 - protein, 175 aa, Glycine max
  unsure (1)..(175): unsure at all Xaa locations
  Clone ID: PAT_MRT3847_9261C.1.pep
ILPAMLLVDTYHTNPENAVRIIFVAPFRGGRPIRVVTFPNTIVQIEPDMNSRFQLLSTTTNGDFVQGKDLAIGKVNVAXCAAVGLTLSYTPTPLLESGLXKDRGLIVEFFGRKSYLAHYVNQAPKKGLLXGNISFDINLALVGKSSLYKAHIVSGKLFXFDLIGACSHFLKNFPE

SEQ ID NO: 277517 - protein, 87 aa, Glycine max
  unsure (1)..(87): unsure at all Xaa locations
  Clone ID: PAT_MRT3847_92620C.1.pep
MFRTPVLQVLRQFVRHESETTTSLVLERSLNRVHLLGRVGQDPVLRQVEGXHPVTIFSLATNEMWRSGDSDVYQLGDVSHQTTWHRI

SEQ ID NO: 277518 - protein, 701 aa, Glycine max
  unsure (1)..(701): unsure at all Xaa locations
  Clone ID: PAT_MRT3847_92621C.1.pep
DEQNNSRAPRFQQNKAQKFFTKLEKEALVKGVPIGQALDIDIPPPRPKRKPNNPYPRKTRIGTTSLHSGAKDGKLNLVESSHVNQALDLKKEPLPEKHDLDEGLTTVKENKDENHAKVFTLLQEVPCSSVSSANESSITMSVPLGNPCAFKEITPSVKEVIARDEKTESFVTVEPENGKLEINDGKQTNGTSKDSRLEDSDALHMKLVQNEKPDGLDCELTIDGMQGNQNYPRHVTVHVVDGNLGTNTQNPSQDMLFRDSMFQPIGGVNGQRNVFTNTAPSNTSESQNNTARSSVHQSFLPYPPFTQHNQDDYQSFLHMSSTFSNLIVSTLMQNPAAHAAASFAATFWPYANPETSANSPRCSQGGFTNRQIGSPPSVAAIAAATVAAATAWWAAHGLLPLCAPLHTSFACPASVTTVPSMNTGEAPALKAEQEKTTLQNPPLQDQMLDPEYSEAQQAQHSASKSPAAILSDSESGDAKLNTSSKVTDHETNKTISEHLDSNKTKGRKPVDRSSCGSNTXSSSDVETDALEKGEKGKEEPEIPDANQLAIEFSNRRRSVSNLTDSWKEVSEEGRLAFQALFSREVLPQSFSPPHALKNTDHQMDNANDNKQNIDDKDEDLDGSKKCSSNYEAMQKNLLFVENNEGLLTIGLGQGKLKTHRTGFKPYKRCSMEAKENRVGASSNQGEEQGCKRIRLEGETST

SEQ ID NO: 277519 - protein, 130 aa, Glycine max
  unsure (1)..(130): unsure at all Xaa locations
  Clone ID: PAT_MRT3847_92622C.1.pep
HSFTAHPKVDPFTGEMFXTYRVISKDGYMHDPVPITVSDPIMMHDFAITENYAIFLDLPLIFRPKEMVKNKTLIFSFDSTKKARFGVLPRYAKDEKLIRWFELPNCFIFHNGGVCLFLFLLNIILINILQ

SEQ ID NO: 277520 - protein, 93 aa, Glycine max
  Clone ID: PAT_MRT3847_92623C.1.pep
MDAYSSGEEVVVKTRKPYTITKQRERWTEEEHNRFLEALKLHGRAWQRIEEHIGTKTAVHIRSHAQKFFTKLEKEALCKGVPIGKALDLDIPP

SEQ ID NO: 277521 - protein, 328 aa, Glycine max
  unsure (1)..(328): unsure at all Xaa locations
  Clone ID: PAT_MRT3847_92624C.1.pep
MGDDGKKISGEGGLVKVEPKPSNGFTSKVVDLLEKLVVKFLYDSSLPHHYLTGNFAPVSETPPTKDLPVKGYLPDCLNGEFVRVGPNPKFAPVAGYHWFDGDGMIHGLRIKDGKATYVSRFVRTSRLKQEEYFGGSKFMKIGDLKGLFGLLLVNIHMLRXSNELYEMRFGSRTGEASQKKLSASAVDFPRVNESYTGRKQRYVYGTTLDSIAKVTGIIKFDLHAEPDNGKTKLEVGGNVQGLYDLGPGKYGSEAVYVPRVPGTDSEEDDGYLICFVHDENTGKSFVHVINAKTMSADPVAVVELPHRVPYGFHAFFVTEEQLQEQGKL

SEQ ID NO: 277522 - protein, 59 aa, Glycine max
  Clone ID: PAT_MRT3847_92625C.1.pep
ASYIAPYSFLSSLAYTSAYSRSTEPLIKNLLHVKASFMTDKWFTAPLQTSYVSNCIGET

SEQ ID NO: 277523 - protein, 115 aa, Glycine max
  Clone ID: PAT_MRT3847_92626C.1.pep
NFKNKQPREKEREFETLLLRMNKRKISLIRILTKTNSRAPKPQIETMTSKNNNDNLNNLSRERSSPDTCRRTHFPAIANRIEFRSETEKEENKRKSKNREVESIRRRREVLLERV

SEQ ID NO: 277524 - protein, 123 aa, Glycine max
  Clone ID: PAT_MRT3847_92627C.1.pep
LLSFGKGSFFLFFPVFFFSRRGFSCHVFFFSIPAASPGFSFCGPPFCVSSSFFFLLVSGLSGYAHSLCISRPFFSPAPASSPFFFLPPPVWFPHFFCSPFGRVCYSVSSHLHYNIFFPLKLIM

SEQ ID NO: 277525 - protein, 67 aa, Glycine max
  unsure (1)..(67): unsure at all Xaa locations
  Clone ID: PAT_MRT3847_92628C.1.pep
LLLCPSFPLLSDCIWFSSLTTTSSPXEYASITEREQLALLQIFPDEEWIQGTPPFIICGDTKTKRGK

SEQ ID NO: 277526 - protein, 67 aa, Glycine max
  Clone ID: PAT_MRT3847_92629C.1.pep
ILQYFLLSISFNKKEQKMKVRDFVGSCDVPLFACPRLIWFSLVTVLGYYLVSESNQPIMWLKATCFV

SEQ ID NO: 277527 - protein, 52 aa, Glycine max
  Clone ID: PAT_MRT3847_9262C.1.pep
VFGKEYNVYPDILSPGGIFGMVNAFPITLVFYLLLGLLSLFRKRKRNPVFKI

SEQ ID NO: 277528 - protein, 74 aa, Glycine max
  Clone ID: PAT_MRT3847_92630C.1.pep
SAKETRPYLPNGFQNFVVPSVKDLELLMLHTRTSCLGIAPHMSPRKAKVIVERPAQLDVVVPNKTACLLSQGDE

SEQ ID NO: 277529 - protein, 62 aa, Glycine max
  Clone ID: PAT_MRT3847_92631C.1.pep
ALTAPQIETMTSKNNNDNLNNLSRERSSPDTCRRTHFPAIANRIEFRSGTEKEENKPARARA

SEQ ID NO: 277530 - protein, 100 aa, Glycine max
  Clone ID: PAT_MRT3847_92632C.1.pep
CYKTNSRAPKPQIETMTSKNNNDNLNNLSRERSSPDTCRRTHFPAIANRIEFRSETEKEENKRKSKNREVESIRRRREVLLKRNQKPNQKLLHTHSPESV

SEQ ID NO: 277531 - protein, 92 aa, Glycine max
  unsure (1)..(92): unsure at all Xaa locations
  Clone ID: PAT_MRT3847_92634C.1.pep
AAGLLNNDFDVYLKRLIEPCLDLVASKSVNKFSGSIQLGLNEXPLRRCVQQXIRSASVSISDFRTAVELNLTILGEDWPLNLEKVCLCALEE

SEQ ID NO: 277532 - protein, 168 aa, Glycine max
  Clone ID: PAT_MRT3847_92635C.1.pep
RRSSEFGSRFRVARTLEQNATFLMHKWQLVACFLDGDIAINILVHRVNSSRKGEFTIEALFQSLYLGGLDKLMHLMQENFPELGLKREDCAEMTWIDSVLYFVGYQSREALLNRSQTTTDSFKAKSDFVRNPIPEAGLEGLWQMLYEDGAQGALLVLFPFGAIMDTIP

SEQ ID NO: 277533 - protein, 79 aa, Glycine max
  Clone ID: PAT_MRT3847_92636C.1.pep
KDPSNPGNPIPKVPSRLKAKKKTPKLKKGQKFAKRVRGRPPLAPKGGKPPGPSREGPGPLGGALPGKPPPPWEPRPRPQ

SEQ ID NO: 277534 - protein, 54 aa, Glycine max
  Clone ID: PAT_MRT3847_92637C.1.pep
GTTTSTRFSYILFQYTTQAHSMAGPFELGSSKKKPQDRVNELHTFKAENMHSNM

SEQ ID NO: 277535 - protein, 322 aa, Glycine max
  Clone ID: PAT_MRT3847_92638C.1.pep
MATVSSPCTVFPILTSTLSKPHLAPLSCRTQKRSRISIITSVAEDREIVPVSEDRGIRLNEVDGFQPSEPHTESDVVVPRLTSSSTVNAIIVLGFGTFAVTKLLTIDHDYWHGWTLFEIVRHIPEHNWIAYEQALKANPVLAKMAISGIVYSIGDWIAQCYEGKPLFEFDRTRVLRSGLVGFTLHGSLSHYYYQLCEALFPFQEWWVVPAKVAFDQTVWSAIWNSIYFVVLGLLRFESLTNIYGELKSTFLPLLTAGWKLWPFAHLITYGVIPVEQRLLWVDCVELIWVTILSTYSNEKSEARISEAASETGSSTSSENSKE

SEQ ID NO: 277536 - protein, 59 aa, Glycine max
  Clone ID: PAT_MRT3847_92639C.1.pep
ARFKNMWTTRPLYTHKLINNTILQIYIYICVQIHIYQLNLYQYMHLKYTSMRNTSIQVR

SEQ ID NO: 277537 - protein, 146 aa, Glycine max
  unsure (1)..(146): unsure at all Xaa locations
  Clone ID: PAT_MRT3847_9263C.1.pep
DRVTERTIFTCRDVDIXVVYYTMATQFRKYLPHYIRWHLCTLLIYILPSFLTAEIKYKRNLINVHISGLFYDGGYKFWTKHEKNLALTEEEKMEEIRNRGSPADVLAKRAYEFGKHVADESLKDQIAADDELYSTKVSKCARLMNL

SEQ ID NO: 277538 - protein, 40 aa, Glycine max
  Clone ID: PAT_MRT3847_92640C.1.pep
KISAQHITKQPSGYHLPNWEVPFFETSTKLCPLIISANHQ

SEQ ID NO: 277539 - protein, 45 aa, Glycine max
  Clone ID: PAT_MRT3847_92641C.1.pep
VLLKLYILYLEAIFLGDVGLNTPITSTIKETPKRLQLRQVKGNCN

SEQ ID NO: 277540 - protein, 91 aa, Glycine max
  Clone ID: PAT_MRT3847_92642C.1.pep
VRPNQIEPIPPCNKGLPNPGIGPEGYFPHGKTGVNSAGAFQNEGSLEKYFFLGAHPDSGRNFLKKTKNNLLKIFFFQQKAAILKCSFILST

SEQ ID NO: 277541 - protein, 122 aa, Glycine max
  unsure (1)..(122): unsure at all Xaa locations
  Clone ID: PAT_MRT3847_92643C.1.pep
RHAGRKTRDDPRARPRVRGRGNRRRAGKAKRRAPAKTKAEGAPKKGRXQRQPXHSTEGXKGRKQXASTEHEAXATPXXRGXEEXANXGKHKQRXXAQGAGSKGRPEDAAQTPXEEPEAQAQS

SEQ ID NO: 277542 - protein, 65 aa, Glycine max
  Clone ID: PAT_MRT3847_92644C.1.pep
SGVIRVPSAFGGSLGGLNVTPQFFFFGSVCFQPRVGFVLGNHYHVHNKYPFFHGGNSVEKKGNPK

SEQ ID NO: 277543 - protein, 201 aa, Glycine max
  Clone ID: PAT_MRT3847_92645C.1.pep
MSYLGLGVSPGTVPVYHGTKLKVLDRRVRITELVLRCVSLGLGAVAIVLVVTDSQVKEFFSFQKKAKFTDMKALVFLVVANGLTVGYSLIQGLRCVVSMIRGNVLFNKPFAWLIFSGDQVMAYVTVAAVVAALQSGVLGRTGQAELQWMKVCNMYGKFCNQMGEGIASAFVVSLSMVVLSCISAFSLFRLYGPNKNKYAGW

SEQ ID NO: 277544 - protein, 55 aa, Glycine max
  Clone ID: PAT_MRT3847_92646C.1.pep
HFFSHQLLRLTKGCFLLPSWIPYRNPPLLIFLTFFNSLIHISSYLYAPHSPFSTQ

SEQ ID NO: 277545 - protein, 74 aa, Glycine max
  Clone ID: PAT_MRT3847_92647C.1.pep
AKDKLGSVVLKTDRFPPKKTIGRFLIMTKSLMNPGDLARSYFWAWFIAGCVKTCYPTNIIMIEFMTNLNQTACS

SEQ ID NO: 277546 - protein, 92 aa, Glycine max
  unsure (1)..(92): unsure at all Xaa locations
  Clone ID: PAT_MRT3847_92648C.1.pep
XWXVXALSSAXVXKQCHRALQLRVXRFHXXIAXLXTXRXXRVXTPLKVVELASRXTCLEVXAKHALDXXXKQREXXRESEEGLPHIELRKVL

SEQ ID NO: 277547 - protein, 91 aa, Glycine max
  unsure (1)..(91): unsure at all Xaa locations
  Clone ID: PAT_MRT3847_92649C.1.pep
MCICRDIVAEYSKQVKALGTTIFELLSEALGLDPSYLEEMDCTKALYVMGQYYPKCPEPELTMGISKHTDCDFITILLXDQIGGLQVLHEN

SEQ ID NO: 277548 - protein, 128 aa, Glycine max
  unsure (1)..(128): unsure at all Xaa locations
  Clone ID: PAT_MRT3847_9264C.1.pep
MAGPVFWGQSDVAHLKLLTDGKXLYEGKHIPVSNIRAGENHVVQIPLMEQEEILNSSASDLRTAMVSKNSKPQATAMHVGALEIIIDRFARPDCNNTGAMLLGDTYHTNPXENADCSILVAPFSGGRP

SEQ ID NO: 277549 - protein, 41 aa, Glycine max
  Clone ID: PAT_MRT3847_92650C.1.pep
LLFVNIGNQYSISQFCVFNDHSISISAKMGKIGEVENLLIH

SEQ ID NO: 277550 - protein, 89 aa, Glycine max
  Clone ID: PAT_MRT3847_92651C.1.pep
DNTTQVSQVPSLSLESRNPDTYMELLLPHRYRTHRLLHILIVVRIVQICVSEPIFAESFGDTFIAAVSFGFRMSLSVDSPWTLSPRHRL

SEQ ID NO: 277551 - protein, 91 aa, Glycine max
  Clone ID: PAT_MRT3847_92652C.1.pep
MPPIQPILDTSQLSNDTHKMNTSKNKFQLLKLNNSTFNNFHLQPTSLMETKLHRTRDRKVRARASSVVSEIVCFFFSLWRNCVVVLCDCKK

SEQ ID NO: 277552 - protein, 31 aa, Glycine max
  Clone ID: PAT_MRT3847_92653C.1.pep
GHRLEPQGFGIGPDGRYRCERPEFTEGTAHV

SEQ ID NO: 277553 - protein, 146 aa, Glycine max
  unsure (1)..(146): unsure at all Xaa locations
  Clone ID: PAT_MRT3847_92654C.1.pep
VGLEAFRIRFIVYSEKIAKTGSLCCVASRPHESNAGSRDWSMGPNEPYWRTNSSFSPPPTRWDFRFQSEGLSYGVNDGVQLYGSSTSSIDKESRGCVRGNHLYDLHYSASDDTXIFLSSPSDLSQGPQWXATCIQEISIDNYETST

SEQ ID NO: 277554 - protein, 226 aa, Glycine max
  unsure (1)..(226): unsure at all Xaa locations
  Clone ID: PAT_MRT3847_92655C.1.pep
MQSLSPPTSNALNLKHVFRPRLGASSRISVKCAFGFEPVSYGVGSSRADWQSSCAILASKVVSQEQPSADQNSGTTDHIAAVNGHKAAVSDFQLVPIGNLAEANNKPLPPKPLTISDLSPAPMHGSKLRVAYQGVPGAYSEAAAGKAYPNCEAIPCDQFEVAFQAVELWIADRAVLPVENSLGGSIHRNYDLLLRHXLHIVGEVQLPVHHCXLALPGVRKEFLTRV

SEQ ID NO: 277555 - protein, 425 aa, Glycine max
  unsure (1)..(425): unsure at all Xaa locations
  Clone ID: PAT_MRT3847_92656C.1.pep
MQTLSPPTSNALNLKHVLRPRRVAPSRIFVKCAFASEPASYGVGSSRADWQSSCAILASKVVSQEQTSSLTXNGGTADHIAAVNGHKAAVSDLQLVPIGNLAQANNKPLPPKPLTISDLSPAPMHGSKLRVAYQGVPGAYSEAAAGKAYPNCEAIPCDQFEVAFQAVELWIADRAVLPVENSLGGSIHRNYDLLLRHRLHIVGEVQLPVHHCLLALPGVRKEFLTRVISHPQALAQCEHTLTKLGLNVAREAVDDTAGAAEFVASNNLRDTAAIASARAAELYGLNVMADGIQDDPSNVTRFVMLAREPIIPRTDRPFKTSIVFAHDKGTSVLFKVLSAFAFRNIILTKIESRPHRNRPIRLVDDANVGTAKHFEYLFYVDFEASMAEVRAQNALAEVQEFTSFLRVLGSYPMDMTPWTPSSRGD

SEQ ID NO: 277556 - protein, 41 aa, Glycine max
  unsure (1)..(41): unsure at all Xaa locations
  Clone ID: PAT_MRT3847_92657C.1.pep
PTQDYIISHQFILDSKTVNHQAFFYASERXVDHIDIFIVGI

SEQ ID NO: 277557 - protein, 80 aa, Glycine max
  unsure (1)..(80): unsure at all Xaa locations
  Clone ID: PAT_MRT3847_92658C.1.pep
PDFQNXQARXKXSXXTXTTPNKKLSQVFIMLLIDXSNFSEALTSTYXXXSLXNPLDYXILHNQLNXXXIIXXYSXXXIAL

SEQ ID NO: 277558 - protein, 84 aa, Glycine max
  Clone ID: PAT_MRT3847_92659C.1.pep
ARGHLWLDVVSKSDLLKTSPVVYATDEPHPSQLELEKYRKSGPNGAINVSVKTQGGLHELKQRVHELLNLQMAKINDISNNQEK

SEQ ID NO: 277559 - protein, 77 aa, Glycine max
  Clone ID: PAT_MRT3847_9265C.1.pep
FQEFLNFCLLLCVRFLKGKKITLCAGHRLRESCSFPLLVYLLNTLLFDIGLRVRFKLLLFLSQSSVQFQVQAGENMD

SEQ ID NO: 277560 - protein, 262 aa, Glycine max
  Clone ID: PAT_MRT3847_92660C.1.pep
MIMAVLGKVKEAGLPLMKLVKLRGMPILQQLHLEERLLRTSSDNWCLINEGTSSPAIVMGLSGKLSELVEAKPVLQDRISIIRRFTGGGTVVVDQNTIFVTLICNKDAVSNVLPFPRSIMSWSGLLYSEVFEGLAGFHLRENDYVFDDRKFGGNAQSITKHRWIHHTSFLWDYEVKNMSYLKLPAKAPEYRLTRSHMDFVCRMKEYVPRSEFIEKTIKAIGGQFSVKSISLESIDIPSVSEYVHTTRLLTEQEIQEACTIQT

SEQ ID NO: 277561 - protein, 73 aa, Glycine max
  Clone ID: PAT_MRT3847_92661C.1.pep
GYRVWEEASAFMAYSNLVPHCTMLVSAAIASRFIHVVIDAIRTSLSIYAVKIVVCMLGSGLREDQPYSGQGHK

SEQ ID NO: 277562 - protein, 69 aa, Glycine max
  Clone ID: PAT_MRT3847_92662C.1.pep
TELTSIYKVLTWRPCQACDIIPRQEIHIEPILQNYHARLNNCSVEQINPLWWETHRYWWIWDIHSTHLN

SEQ ID NO: 277563 - protein, 182 aa, Glycine max
  Clone ID: PAT_MRT3847_92663C.1.pep
VTVHQMESAICLRHCPFPYGSKGFQGARPSRFHHLKINHATPLSLPQISTTRSSVTRSFGHVNCMLERFISMPSENEGSGNRILRGVAAASLVLTCVLGLFSFSGKNMNPKLTTAYGNGLEFPISKPQGRFALKSLLEIPKDEELADTQNKMRSNFSVRGPSQQEVKNLKWLAIGLSSQSPD

SEQ ID NO: 277564 - protein, 95 aa, Glycine max
  unsure (1)..(95): unsure at all Xaa locations
  Clone ID: PAT_MRT3847_92664C.1.pep
XDVLXLCXGDLNTQDLLTIIMVEDGTSPSIPTNHGEVTSLVSIGQKHLCSVFSIKRMMYSLLGRFDNAASSLVSWKLVLAPATXYYLSSKGSTLG

SEQ ID NO: 277565 - protein, 82 aa, Glycine max
  Clone ID: PAT_MRT3847_92665C.1.pep
EEFFRFRTRASFRGTDYTVLRLLRLFKPFQSRCAFPLYVLLVLRAFLGIIPRTRLLPPPPAPRRPSPRLLRSPVIGSGAPRL

SEQ ID NO: 277566 - protein, 61 aa, Glycine max
  unsure (1)..(61): unsure at all Xaa locations
  Clone ID: PAT_MRT3847_92666C.1.pep
LRVRGKTKRKELVPFTTEGPPYALPHKKGEKGKWXFVFGDGEEMTLKPGTTEEEAYNMLIS

SEQ ID NO: 277567 - protein, 143 aa, Glycine max
  unsure (1)..(143): unsure at all Xaa locations
  Clone ID: PAT_MRT3847_92667C.1.pep
CLGXLGPGCPALVXGFGLGSLLWVVCSXLVPGCXXXGCWSXPLXALCWVGRPWWLFSXVAPCCGCXVFGFVXVPFXXCWAGRPWWLCSGVXPXCGCFVFGFXPVPFLGCVPPXXFIFPPLXXRAGRRLISSSSREFFRAGPPG

SEQ ID NO: 277568 - protein, 204 aa, Glycine max
  unsure (1)..(204): unsure at all Xaa locations
  Clone ID: PAT_MRT3847_92668C.1.pep
MPNQMPFHSLGSAQQVGHQFENENEGHSEVQGVGLGFSPEIDSSTVQESSSMGSALDQASPEANSFCHLQQIMDQLDIKTKMCIRDSLYRLAKSAEQRHNNSNANGCIGDDETCKAMMAQDANRCAGLMDMETDTNPIDRSVAHLLFHRPSDPSVLLPNETLPFXSSAPMHNGSVINPPVKTENQVCQEDSTGVEKKVLQGNTS

SEQ ID NO: 277569 - protein, 42 aa, Glycine max
  Clone ID: PAT_MRT3847_92669C.1.pep
CASGAYHFIPLTSFMILDYVRTSVCVTCYFTTYEGWYVVGRY

SEQ ID NO: 277570 - protein, 126 aa, Glycine max
  unsure (1)..(126): unsure at all Xaa locations
  Clone ID: PAT_MRT3847_9266C.1.pep
LERLSYIDGLLTGIPNYKAGVPTREGLNAKDAPELASINYEXYELQPNEGLALVNGTALGTPLATLGLIEANILSVXTEVLSAKYAEVIHGKPAYTDHLTHKLEHHPGQIRGADIMDHISDGSYYM

SEQ ID NO: 277571 - protein, 60 aa, Glycine max
  Clone ID: PAT_MRT3847_92670C.1.pep
LNKNHNFFKTSLFVLFIRRRRMNIPATQTSPSMNNARLSDNRRNLFNETTHLKKTFKRGG

SEQ ID NO: 277572 - protein, 66 aa, Glycine max
  Clone ID: PAT_MRT3847_92671C.1.pep
MPVPRGPQNPSAIRPAPEVAASASDRPSAERLLESEDALWRSLRPHTIPGTALSSLVNQPYLPIAA

SEQ ID NO: 277573 - protein, 63 aa, Glycine max
  Clone ID: PAT_MRT3847_92672C.1.pep
IICKQKLGQKHLFLTSIKCHIIFRKINDFFYRQMLAGNIVLLVEGFEPTTSPPFPLPFTTRPS

SEQ ID NO: 277574 - protein, 301 aa, Glycine max
  unsure (1)..(301): unsure at all Xaa locations
  Clone ID: PAT_MRT3847_92673C.1.pep
MPATDYQGSSSPSSLTHFGRSILSLRQEQVHSISMEGSSLEAELESFQQHVTDRFLELTSVVHDDLLSLSWVGKLLHCFLCCQEEFKAILHSHRAQVLRPPLDRMVSEYFERSVKALDVCNAIRDGIEQIRQWQKLLEIVLYALGHQRSIGEGQFRRAKKALIDLHIGMLDDQDSNASIAHRNRSFGRSTGSRDSHSHGNNHSNNNTYHHRSLGHFRSLSWSVSRTWSAARQLQAIGNNIYPPKANELMASGGLAMPVFIMNSDPVXCVMLALVAAIPCQDRGLHVHFTIPRNYSWAAAIL

SEQ ID NO: 277575 - protein, 52 aa, Glycine max
  unsure (1)..(52): unsure at all Xaa locations
  Clone ID: PAT_MRT3847_92674C.1.pep
IXTXLPPLSXTKTAXSPLLPXTXSLRSKTPXARCRLRXXDVSPRXACALMKK

SEQ ID NO: 277576 - protein, 73 aa, Glycine max
  Clone ID: PAT_MRT3847_92675C.1.pep
ILMARIFPRLAYPELFSGGPLPLLCHLPMVRAILNLTPSSALPTFCIPAPPPGSPSPPLLFPFTSSPPPPPTH

SEQ ID NO: 277577 - protein, 126 aa, Glycine max
  Clone ID: PAT_MRT3847_92676C.1.pep
MAVALTIVLSLLSVLSSASCARMVGGKTEVPDVRTNREVQELGRFAVEEYNRGLKQWKNNGSEQLNFSEVVEAQQQVVSGMKYYLKISATHKGVHKMFTSVVVVKPWLHSKQLLHFAPAAPSSKDF

SEQ ID NO: 277578 - protein, 69 aa, Glycine max
  Clone ID: PAT_MRT3847_92677C.1.pep
HRSPFSNSNLFPFLPFLFIILIVVGVHIRCCFSYYCGIVSVLDFECFFLLVIDFQVGTYLQSASWKVLF

SEQ ID NO: 277579 - protein, 141 aa, Glycine max
  Clone ID: PAT_MRT3847_92678C.1.pep
MAVALTILVTLLSVLSSASCARMVGGKTEIPEVRKNRQVQELGRFAVEEYNLGLKLLKNNNVDNGREQLNFSEVVEAQQQVVSGMKYYLKISATHNGVHEMFTSVVVVKPWLHSKQLLHFAPASSTTTTTTTMHPVVRKDN

SEQ ID NO: 277580 - protein, 39 aa, Glycine max
  Clone ID: PAT_MRT3847_92679C.1.pep
YFNVNGMWIMRLACLLHRTNQMLTDFRDTATQTSIINVD

SEQ ID NO: 277581 - protein, 121 aa, Glycine max
  Clone ID: PAT_MRT3847_9267C.1.pep
DESIARLTSSGSLKHIDLMFLDHYKPAYTTDLKLCEELGLITKGSVLAADNVIKPGNPPYLEYVRSSVDEKTNVKMYEKRYGKANFSQSKGNPNLVYESKLINSYEPTGVPDGIEITRCVG

SEQ ID NO: 277582 - protein, 58 aa, Glycine max
  Clone ID: PAT_MRT3847_92680C.1.pep
YGCEKTTEGHYMRHLQVQYYTVLRSGGVLQITGNSRKKYMSNFFYNFFFYLFLLYFQL

SEQ ID NO: 277583 - protein, 105 aa, Glycine max
  Clone ID: PAT_MRT3847_92681C.1.pep
SPRGMEWGRPFPFVPATQGTRSLSTPPLGQPPFLPLPFLQGLNPTGVFLTAPGVYSPLISRELGSPLKLPGFFHKPKIRIFWLFFRKTPPFFFFSLCLPPNFFLF

SEQ ID NO: 277584 - protein, 470 aa, Glycine max
  Clone ID: PAT_MRT3847_92682C.1.pep
MALAVSTTSSSSAAAAASSSFFSRLGSSSDAKAPQIGSFRFPERSLVSSVVVNVTQRRSLVRPLNAEPQRNDSIVPLAATIVAPEVEKEEEDFEQIAKDLENASPLEIMDRALEKFGNDIAIAFSGAEDVALIEYAHLTGRPYRVFSLDTGRLNPETYKFFDAVEKHYGIHIEYMFPDAVEVQALVRTKGLFSFYEDGHQECCRVRKVRPLRRALKGLKAWITGQRKDQSPGTRSEIPVVQVDPVFEGLDGGIGSLVKWNPVANVNGLDIWSFLRTMDVPVNSLHSQGYVSIGCEPCTRPVLPGQHEREGRWWWEDAKAKECGLHKGNIKHEDAAQLNGNGASQANGSATVADIFNSQDVVSLSRSGIENLAKLENRKEPWLVVLYAPWCRFCQAMEESYVDLAEKLAGSGVKVAKFRADGDQKEYAKTELQLGSFPTILLFPKHSSQPIKYPSEKRDVDSLTAFVNALR

SEQ ID NO: 277585 - protein, 114 aa, Glycine max
  unsure (1)..(114): unsure at all Xaa locations
  Clone ID: PAT_MRT3847_92683C.1.pep
RALSFRADYKARVGSQLQEGACNNLEMQEAYLVNLVNVLLELYLHSPFVARQFXRKALSXXQLLLKXNFLPYLHIVEFHPMHRMXNAPSSNDNXDLLLNILSFFVLQSSMIKPF

SEQ ID NO: 277586 - protein, 207 aa, Glycine max
  Clone ID: PAT_MRT3847_92684C.1.pep
MALQEEGWPLGLRLFNERIGLARNGDFSGSVSFSTMLTASPTRSTDSSSDLDTQSTGSFFRDKSITLGSLIGISSFLELSRRSTRGRILVEPSKDNKKINKLRPWLFSLCSMLSTDAVSVNVAPSLGHYLVAERRAASTHRRNNQCSTIYGPNDLSQVQESNSLFVGGQGAAHSSSTSLGEDRGRESNPALEQSNEYAAPIICCLCR

SEQ ID NO: 277587 - protein, 105 aa, Glycine max
  unsure (1)..(105): unsure at all Xaa locations
  Clone ID: PAT_MRT3847_92685C.1.pep
MAPRSSSKDAQDLFRALXIIDLYVIYAVFTAFIQVVYMALVGSFPFNSFLSGVLSCVGTAVLAVCLRIQVNKENKEFKDLAPERAFADFVLCNLVLHLVIMNFLG

SEQ ID NO: 277588 - protein, 116 aa, Glycine max
  Clone ID: PAT_MRT3847_92686C.1.pep
MAPRSSSKDAQDLFRALWSAYAATPTNLKIIDLYVIYAVFTAFIQVVYMALVGSFPFNSFLSGVLSCVGTAVLAVCLKIQVNKENKEFKDLAPERAFADFVLCNLVLHLVIMNFLG

SEQ ID NO: 277589 - protein, 111 aa, Glycine max
  Clone ID: PAT_MRT3847_92687C.1.pep
ARISQLVPDLPRFVHSTSYHGLCIKEYPTVGLCEQHDLGHESRGRSAPVGRVKHPKSLGLGAHGSWTAHATKVFAAKAVATLSQGATRSVPLQIDRSHRDGTQGKRGMPGS

SEQ ID NO: 277590 - protein, 52 aa, Glycine max
  Clone ID: PAT_MRT3847_92688C.1.pep
YGCEKTTEGADVAGSSVRLLAVHSEFWEFRGQPQLSCGARVSGCDVSCGCLH

SEQ ID NO: 277591 - protein, 91 aa, Glycine max
  unsure (1)..(91): unsure at all Xaa locations
  Clone ID: PAT_MRT3847_92689C.1.pep
GWKEPFFLECARQDDEKRDLVFKEDGQEYGHVLXLLLNGRCEAMCIDCTKCLXHIRCKIHKMVXIAAXNIILVSLRDYQDDKVDVMLKYMP

SEQ ID NO: 277592 - protein, 164 aa, Glycine max
  unsure (1)..(164): unsure at all Xaa locations
  Clone ID: PAT_MRT3847_9268C.1.pep
SVETFKGPMRVLNMGQFKIALPKNTVGGTIPRRDLLANFLTEGTCRASVDLQRTHRIXGMINMVATVGIPENTGIALACAMNSAFRGRASSDINTTCSQDCELWNTASTKAMTMSSNPNACSVAWEXEFLRRTGVXIEISFCVTGWTATPIHDVQGTIDWVISL

SEQ ID NO: 277593 - protein, 124 aa, Glycine max
  unsure (1)..(124): unsure at all Xaa locations
  Clone ID: PAT_MRT3847_92690C.1.pep
MWVLQIPQFVRHVPSQSHLCYTSHVSSRVPVSFVSLNPSANLINDINSNNNQLIQSLCKGGNLKQALHLLCCEPNPTQQTFEHLIYSCAQKNSLSYGLDVHRCLVDSGFDQDPFXAXKLINMYY

SEQ ID NO: 277594 - protein, 85 aa, Glycine max
  Clone ID: PAT_MRT3847_92691C.1.pep
TQKFGLFLFNPGVQPDQAGKLKKPELNQGLLICSCLKPQVSPGSFLLAGPLNFVPFSCELLLIFPMFKVPPPPHCSKPSNPPKNL

SEQ ID NO: 277595 - protein, 118 aa, Glycine max
  unsure (1)..(118): unsure at all Xaa locations
  Clone ID: PAT_MRT3847_92692C.1.pep
MATTTFCTYLFLLLCVYLSIFINLSSSSSEGDILLSFKASIEDSKNALSSWFNTSSNHHCNWTGITCCTTPSLSVTSINLQSLNLCGDISSXICDLPNLDYLNLADNIFNQPIPLYLS

SEQ ID NO: 277596 - protein, 130 aa, Glycine max
  Clone ID: PAT_MRT3847_92693C.1.pep
HASALIERLRGPLINRSSSCWTVTSVVEYLHVLPYSEILSEWISRETFSNSLQGSRLSEKNTMMGCPEVKKSYISSEGMSIGLDIKPSIDAIEALNQNENNGSCAVTCSASIKDSQNVYVDNTLACPSKK

SEQ ID NO: 277597 - protein, 54 aa, Glycine max
  Clone ID: PAT_MRT3847_92694C.1.pep
ITCLIWKLNGRWMEKIHFCTNNSFQILCENAKTEISRIHVQKLLLTTHKKNMIP

SEQ ID NO: 277598 - protein, 60 aa, Glycine max
  Clone ID: PAT_MRT3847_92695C.1.pep
DNHVWRKYGQKGVLNSEFPRSYFRCGHKYDQGCLAKKQVQRDQENSNMYRTTYIGIHTCN

SEQ ID NO: 277599 - protein, 54 aa, Glycine max
  Clone ID: PAT_MRT3847_92696C.1.pep
VVHNIFLTKYYRLLQNTQIHDKKSKYPSFYKFKRIKLIKLVSIYFFFYFLHSFI

SEQ ID NO: 277600 - protein, 45 aa, Glycine max
  unsure (1)..(45): unsure at all Xaa locations
  Clone ID: PAT_MRT3847_92697C.1.pep
YIFPPXQFXXFHEICXIXXVVAIHSLTLGSVXTPRRXNVXRIASC

SEQ ID NO: 277601 - protein, 39 aa, Glycine max
  Clone ID: PAT_MRT3847_92698C.1.pep
RETLTFFDVIMLLNLIHILNNIYFILVLVRKVLHFEHYS

SEQ ID NO: 277602 - protein, 99 aa, Glycine max
  unsure (1)..(99): unsure at all Xaa locations
  Clone ID: PAT_MRT3847_92699C.1.pep
VEQNAKYSGKTQTGGSITLEVESSATIDDVKAKIXRKEGIRPXQWRLIFAAKQLVDGRSIADYYIQMDISFNLVLRVRGGMQIVXNTLTVLTITLKAEC

SEQ ID NO: 277603 - protein, 57 aa, Glycine max
  Clone ID: PAT_MRT3847_9269C.1.pep
EKESEGKKSNRKVYPRSPIPDRRVGALIQDFTSLNLKLSRELKKKQRSLNLTEILYR

SEQ ID NO: 277604 - protein, 142 aa, Glycine max
  unsure (1)..(142): unsure at all Xaa locations
  Clone ID: PAT_MRT3847_926C.1.pep
KKIKIKKIFLKKKKKKKKKKREVGENKKKKKKKKKKKVKKKKKKKKKKKKKKKKPKKKKKKKEKKNTTKKXKKKKKNKKKKKKPFKKKNIPPSFDALKLKIPYLQLILMLKIFPSRNNKQIKTRTQTTAIKKKKLEPDELNL

SEQ ID NO: 277605 - protein, 50 aa, Glycine max
  Clone ID: PAT_MRT3847_92700C.1.pep
QNQKPTWRLVGIRTKEGKVENFPVKKPVRFAHSIRVAYQYFTIVFSTHDS

SEQ ID NO: 277606 - protein, 85 aa, Glycine max
  Clone ID: PAT_MRT3847_92701C.1.pep
TLFLPHPGSIRDVTVCGGNNPLAVVVVGIISNAVVVERNDASQTKRCVVYNAVAVWSVFTNHSGRCCSKHHSWLEKSNFFLELEL

SEQ ID NO: 277607 - protein, 79 aa, Glycine max
  Clone ID: PAT_MRT3847_92702C.1.pep
LLCLIKSSYFLNFFFKKKTWIRAGLGQKKKKKFLSLLLQKPFIFGMVFFLFKPKFFQIGRVFPLGFLRIFFRNPSLSFF

SEQ ID NO: 277608 - protein, 55 aa, Glycine max
  Clone ID: PAT_MRT3847_92703C.1.pep
YQRIMGDLLVIYEYGPRNWVIYKSYHGAHAWIILIANPGIQNGWTNFQTQTCPYL

SEQ ID NO: 277609 - protein, 80 aa, Glycine max
  unsure (1)..(80): unsure at all Xaa locations
  Clone ID: PAT_MRT3847_92704C.1.pep
ARTRTXAREXRXRXXYXHHXNXVXKXQXDXDQLLRXHVXXXGXPPATEXSXKXHXVIXGSXXNXFSTXEXENTQTATTFK

SEQ ID NO: 277610 - protein, 37 aa, Glycine max
  Clone ID: PAT_MRT3847_92705C.1.pep
FGIFILTKSTREGRYMGVNKKFHTTSPRTIAKGLPNI

SEQ ID NO: 277611 - protein, 107 aa, Glycine max
  unsure (1)..(107): unsure at all Xaa locations
  Clone ID: PAT_MRT3847_92706C.1.pep
AFPIIIVFDDNLVLXNTQKFCDGNFPVDSWLPILVNWLYPVSQLPSEAVVVNATCGSCRRLLFLYFLTNTFKTKHFLHLVDKIRTPFLGIDLPIRGIPSLRFPNFYA

SEQ ID NO: 277612 - protein, 147 aa, Glycine max
  Clone ID: PAT_MRT3847_92707C.1.pep
RGELWEGVLPKRALHEGVHGFGSSQSADSRWKPVVAGHHNQQNQGGNELMNVVRKRTEKLSIKENKCKSGPHSKVCYCAPTTHEGSFRCRLHRKKSATDDNNKSNLRLNSQYGMVEFQPQMPRYGRVSCDQVGTRDSLIKLSRMDSV

SEQ ID NO: 277613 - protein, 79 aa, Glycine max
  Clone ID: PAT_MRT3847_92708C.1.pep
SGSGKTYTMWGPPSAMFEEPSPKSHKGIVPRIFQMLFSELEREQHVSDGKQFNYQCRCSFLEIYNQQIGDLLDPTQRNL

SEQ ID NO: 277614 - protein, 79 aa, Glycine max
  Clone ID: PAT_MRT3847_92709C.1.pep
EQSNDNEPLDCVRGESEGHFQTMPSFFIVLCIAANYLCSVFSSIIWICACRIFFPTRGWGVLTLFDSSIFQIKKIYKRF

SEQ ID NO: 277615 - protein, 75 aa, Glycine max
  Clone ID: PAT_MRT3847_9270C.1.pep
DRFEGQSGSVKKKSEKKVRIRKVYPRSPIPDRRVGALNPRFHQLELEIKQRSEKETDKGLNLTESPISNRRVFSK

SEQ ID NO: 277616 - protein, 348 aa, Glycine max
  Clone ID: PAT_MRT3847_92710C.1.pep
MHVETPQPLKRLRLQGQESQPLHPPPNGSPSPSSKKLKLDDNASGKKPQNKPVSSDGNPGIATRPLPPRDGIVDKGKQPASLPLNHRGRRLPSERVPQSIPSREPTVEPGRFLLPNNQMPRTQTLVIPKDEPIDELTDYEMPIAVIPPESSVRNSSIKNGVAGKHSGHVTVTSSQNRDGVGDEDVIPTSKKEATCNVEIASSTLGEVKLSLSYGSALQGSDFHIPSRDQLIKVMEDKCLRSYKITDPNFSVKNLLRDICDCMLEFRNDSNDDSQEGSVISSSVDVSKEPRAPGTLSVVGNKDLDTSSHFSNGSINVKSSDDLVSPRSLPLAHPNGLSDAVPGQDGQNE

SEQ ID NO: 277617 - protein, 86 aa, Glycine max
  unsure (1)..(86): unsure at all Xaa locations
  Clone ID: PAT_MRT3847_92711C.1.pep
GCEKTTDGTWKSKLKAQFPSLNEYSPILGDFSTATGIATFTMILVSQFICDNYXXAVVAIITPTVLLLTRAGFFPLXLHGGPLAPG

SEQ ID NO: 277618 - protein, 98 aa, Glycine max
  Clone ID: PAT_MRT3847_92712C.1.pep
DGNMFERKNGEGHQSITAAGKKGMGRKKNNLGHPRGFPEQKLQHLGSRKVDRGPDKNNDMGARSGTLAWILETGHPISFFFFFFFFFFFFFFFFFFFF

SEQ ID NO: 277619 - protein, 238 aa, Glycine max
  Clone ID: PAT_MRT3847_92713C.1.pep
MSRYLRLQLPLIDAQLSQSHHLLRSYVSHNTLSLSPHHRQELDNFLAQYLIVLCTFKEQLQQHVRVHAVEAVMACRDIENTLQALTGVSLGEGTGATMSDDEDDLQMDFSLDQSSAEGHDMMGFGLPTESERSLMERVRQELKIELKQGFKSRIEDVREEILRKRRAGKLPGDTTSVLKNWWQQHAKWPYPTEDDKAKLVEETGLQLKQINNWFINQRKRNWHSNSQSVTSLKSKRKR

SEQ ID NO: 277620 - protein, 133 aa, Glycine max
  unsure (1)..(133): unsure at all Xaa locations
  Clone ID: PAT_MRT3847_92714C.1.pep
SAFSAAPSRTDQSHRLGACDRSRQRHSXTSCFQLVELVPRLGKAPAMRIHRHRSPSRPLLTSSLCGLSSQPLLWCVLQIVLGVLESFCRERIPVCTRYGSQHRALKNSLSSSFSSIGRVCRTPNELGNMQMNL

SEQ ID NO: 277621 - protein, 122 aa, Glycine max
  unsure (1)..(122): unsure at all Xaa locations
  Clone ID: PAT_MRT3847_92715C.1.pep
SRINRVLRNKKADSYESAAREXMIRQENTIVGIIGDKXRDLLGGHIDXSRTFKLPNPXSTYSSSYTSQQYSLXPINLNVIRSVQIRAQTTLXVVSTECQQVMLETTLCCFLFRGFNKLCALV

SEQ ID NO: 277622 - protein, 72 aa, Glycine max
  unsure (1)..(72): unsure at all Xaa locations
  Clone ID: PAT_MRT3847_92716C.1.pep
KHKYMCITVECYSKRTLNLYYMPRDGSRGGQXXGGXEPPHPPPLLGSFQXYTYIYIFKLIXIKLILYVVIII

SEQ ID NO: 277623 - protein, 55 aa, Glycine max
  unsure (1)..(55): unsure at all Xaa locations
  Clone ID: PAT_MRT3847_92717C.1.pep
RYTGIRMRXCGKWFDEIRARNMRSMIWLASYSTPVAAVRAYDTVVCDVLGPCARL

SEQ ID NO: 277624 - protein, 105 aa, Glycine max
  Clone ID: PAT_MRT3847_92718C.1.pep
CVRLCLSNALEQICTELSAAFGNVYRIQTGWFILDPRLREDLQSSVSQKLDLAHISYIGRDSSSISYKYVQYSNDDLQSYIMDLFQRSPQSVHYPQHRNLRVFIM

SEQ ID NO: 277625 - protein, 45 aa, Glycine max
  Clone ID: PAT_MRT3847_92719C.1.pep
KIVFVGATLNSTPINQILAMGGKLKVPPKSLVSAKPTFKHHQLKP

SEQ ID NO: 277626 - protein, 218 aa, Glycine max
  unsure (1)..(218): unsure at all Xaa locations
  Clone ID: PAT_MRT3847_9271C.1.pep
HEKISQSKIALPKNTVGGTILRSDLLANFLTKGNFKASVDLQHTHHIKGMIKMVATVGIPENTGISLACAMNSSFKGRASSNIYTICSQDCKLXNPTYTKAITISFNPNPYSNTXSLKFLKHTKFHYNIIYITKXLPPQLQNIQITINXFISSREYIPRTYYIVNPQNPFVLNXRLGKLTCPPGXLPRSMKRIPLSIGXDLSPKNSMLINIPDTSLSI

SEQ ID NO: 277627 - protein, 191 aa, Glycine max
  unsure (1)..(191): unsure at all Xaa locations
  Clone ID: PAT_MRT3847_92720C.1.pep
EILTKIARRFGKGLXKEPQFFKNGEAGMVKMVPTQPMGVETFSGDPPPGRFAVRDMGQPVAVGVIKRVGKEDPPGARVPKAAPKKKGLHFGNFASPCDHQRGFKKTCSFPGVYLCRVLGVCFPRYILRGPPISWSRSLQNWVFDRREHFRCGLFLMRPVFCFDGKSLGFSKKKKTQKKKKQKKKKKKKKKK

SEQ ID NO: 277628 - protein, 114 aa, Glycine max
  Clone ID: PAT_MRT3847_92721C.1.pep
VGGKASCRRNFSLDGVLSDAFGQPVDKENEVFASLLYADTGAPVENTADDEAPLLASYDGIEFSSCERPSKLLLGRASFKLKISQLSSKCDNRLLLISSCVPKLGKYAFLEAYS

SEQ ID NO: 277629 - protein, 130 aa, Glycine max
  Clone ID: PAT_MRT3847_92722C.1.pep
MPSASSKLYADDVSLLVVTLDTNPFFWSTFPFPFAEFLSQVLAFLNSILLLGQLNQVIVIATGCNSCGYIYDSTSDKNHGSTTGTMPALYSNLLHNLDEFLARDRQLDADAAHAPGTVPSSLLSGSLSMA

SEQ ID NO: 277630 - protein, 92 aa, Glycine max
  Clone ID: PAT_MRT3847_92723C.1.pep
MPSAPSKLYADDVSLLVVTLDTNPFFWSTFPFPFAEFLSQVLAFLNTILLLGQLNQVIVIATGCNSCGYVYDSTSDKNHGSTTGTMPALYSN

SEQ ID NO: 277631 - protein, 107 aa, Glycine max
  Clone ID: PAT_MRT3847_92724C.1.pep
QNGGPPPPQQKRTCMCLPKTHPGSFRCSLPKKNHAPGPGPYFPPPLNGGKTPITNSLVKIPGVEGNLFKRALPPFICPSSPHQKRRGGFPPRPNRLSVMSKAKDPLF

SEQ ID NO: 277632 - protein, 214 aa, Glycine max
  Clone ID: PAT_MRT3847_92725C.1.pep
MDSLFSLTPTLRPFNNCIPLSLTHFTPPTRVKVSALQPRRNHGGLGVALLSVTANAKLRISPFVATLAANPTFVSGLLAWLIAQSMKVFLNFFMERKWDLRLLFASGGMPSSHSALCTALSTSVAICHGVADSLFPVCLGFSLIVMYDAIGVRRHAGMQAQVLNLIVADLFQGHPISERKLKELLGHTPSQVFAGALLGFLVACFCCQAYMVGA

SEQ ID NO: 277633 - protein, 71 aa, Glycine max
  Clone ID: PAT_MRT3847_92726C.1.pep
ESKFQPIVPQELGTTQHNSEIEEKGTTQIKVRRESATQLVKNPNLAKKSEEKSTPPNRINIHKVKERKQIG

SEQ ID NO: 277634 - protein, 140 aa, Glycine max
  Clone ID: PAT_MRT3847_92727C.1.pep
TFFYLKILVLVPFEFDYVIRKLVVLVIEAKNLPPTDPNGLSDPYVRLQLGKHRFRTKVIKKCLNPKWDEEFSFRVDDLNEELVISVMDEDKFFNDDFVGQLKVPISIVFEEEIKSLGTAWYSLQPKSKKSKNKESGVLRC

SEQ ID NO: 277635 - protein, 40 aa, Glycine max
  Clone ID: PAT_MRT3847_92728C.1.pep
YPHAILPKNPLKTLILFNITHYCILLKLFNSNYSHSYYYY

SEQ ID NO: 277636 - protein, 76 aa, Glycine max
  Clone ID: PAT_MRT3847_92729C.1.pep
INAQILIALKQRTMKLFTCAPYTGFYMGHHLEGGDKSFKNPMSTGTELGAAIDKKVSASLDSGEPAPAEAERAPIA

SEQ ID NO: 277637 - protein, 121 aa, Glycine max
  Clone ID: PAT_MRT3847_9272C.1.pep
MIPERQQGGGAPHGILLALVVAIVLIVPFFLGDQGQAITQALSDLLSPFGLLLLPILLLLTIQFLSSDRGSFVSALFSTGEPDTIHRLSGSPFGVALFLILILFLLFNRRLSIFGGDDSDD

SEQ ID NO: 277638 - protein, 48 aa, Glycine max
  unsure (1)..(48): unsure at all Xaa locations
  Clone ID: PAT_MRT3847_92730C.1.pep
KGVFINAFILRFRXLPGIRFXISENERVHLDPHWSRRXSRSEMLLGVY

SEQ ID NO: 277639 - protein, 32 aa, Glycine max
  Clone ID: PAT_MRT3847_92731C.1.pep
VMSNLVTVSCICGNVAQEVLLYSHHPGIKVCL

SEQ ID NO: 277640 - protein, 52 aa, Glycine max
  Clone ID: PAT_MRT3847_92732C.1.pep
SNRYTLNTQKPCFQLMICYQLHSYCGYTTHGNYIDECRVIQLIDPLCGLIGR

SEQ ID NO: 277641 - protein, 97 aa, Glycine max
  unsure (1)..(97): unsure at all Xaa locations
  Clone ID: PAT_MRT3847_92733C.1.pep
XWRTSCPXASCEPPSVPILSHTXLXXHRCTTRFKVNYXEITGPFLTLRXXGXNSPSISSPSXXLXGKISESKGGXRDGLTSLYXDLVVPXDPXGXXC

SEQ ID NO: 277642 - protein, 93 aa, Glycine max
  Clone ID: PAT_MRT3847_92734C.1.pep
KGVQGLFFWVRSPLVCCGSQALRAQKFWWGWGPCKVPKFFPLKKKGGGVFVFWALGLGSCFKRWKKKKLLLRGVFGSFKNWGAFLKLWDLRLF

SEQ ID NO: 277643 - protein, 92 aa, Glycine max
  Clone ID: PAT_MRT3847_92735C.1.pep
RGVVHLRELLVILVISGLARFVAEARWCQDKRHCPWLVSGVHITAPYNLEWHESQRRYLAQRTCEEAFERVHMQRINSSGFEYSFISHNLID

SEQ ID NO: 277644 - protein, 160 aa, Glycine max
  Clone ID: PAT_MRT3847_92736C.1.pep
MQRFSNTVIGFLNFFTLLASIPIIGAGLWMARSTTTCENFFQTPLLVIGFVVLVISLAGFIGACFHVAWALWVYLVIMVFIIAALLGFAVFGFVVTEQGGGVEVPGKAFKEYCLDRYSPWLRNRIKDPQYWSSIMSCIWGSNTCAKLAVWTTLEYVQRDI

SEQ ID NO: 277645 - protein, 70 aa, Glycine max
  Clone ID: PAT_MRT3847_92737C.1.pep
AISRPWPKLQKLKLQQFQANCPYGCTLFKSDDWPYKIFAPGLSDLLKGNLGFLSYLKTPCFCECRLYYRP

SEQ ID NO: 277646 - protein, 73 aa, Glycine max
  Clone ID: PAT_MRT3847_92738C.1.pep
HNQTFLLYKKPFLHFQLFYSLFVNNLLNLSTTHTSIPCPLFYTLSLFTIITTSSINFPKTNSYFKVIIIPHLL

SEQ ID NO: 277647 - protein, 149 aa, Glycine max
  unsure (1)..(149): unsure at all Xaa locations
  Clone ID: PAT_MRT3847_92739C.1.pep
EGMLQPNISSTHSVICIFMSAENTSXKDCPEILEIKGRGRLDALEKFLPDLRQSRTRAMMAEHFVYNESNDQSTVRDEADSYILDDRVXFADPVPGAELYLRPPHKTTAEMLSNILSIEQIDPVNSIDIGLIGMIRWQKTSLTSPISPT

SEQ ID NO: 277648 - protein, 35 aa, Glycine max
  Clone ID: PAT_MRT3847_9273C.1.pep
VNRAACNGAYTDSVVVLKRSSRGNQRSTRVSVLKC

SEQ ID NO: 277649 - protein, 38 aa, Glycine max
  Clone ID: PAT_MRT3847_92740C.1.pep
AYDRAPHTPLFHVSLINSNEGPYLRILLVITTLLSNIL

SEQ ID NO: 277650 - protein, 168 aa, Glycine max
  Clone ID: PAT_MRT3847_92741C.1.pep
MEPDNIDWDNIDSTFSQDDTYENFGAPMWVDLSAFDESLVDDEAWFCTHDCKHPKTAEDFLKPTTTRKSKAKLENSSILESSYAKSSERSRRPSCSGSFYEDSENRNPNFSAPLPNGRTNKLKKPLIKTNKANSKQMNNGPLKSTFSAQNLLGGREILSQISGFCSEL

SEQ ID NO: 277651 - protein, 127 aa, Glycine max
  unsure (1)..(127): unsure at all Xaa locations
  Clone ID: PAT_MRT3847_92742C.1.pep
FGAVAWVLLVLCSGLVCRFSFVVCGXGFCFVPFFGVVFXVRFWLGCAPGCAWWAASXFFSXFFVWXGCAXXSFXPRXVVLVSFXLSPXWLVWGLXPPWXCAXVASFRVLFLNPSGGCWWGGRKLVCS

SEQ ID NO: 277652 - protein, 157 aa, Glycine max
  Clone ID: PAT_MRT3847_92743C.1.pep
TETTCRIMGSRAVLISTHALSSLWSSSTSLSTSTASPTADVICLMYSKSHACKGIPQHNIQTSLYQVRICEFHFSGKWNKDEPLSVASLTSCSTLSSVSPISSTISSPRYFGVISSLPFHMNSPSTLSNIASFFSLPTQVLLSHVLSSTCMVSCTDE

SEQ ID NO: 277653 - protein, 136 aa, Glycine max
  Clone ID: PAT_MRT3847_92744C.1.pep
ARGAGRTQCQGGFFPYFGEIFPCGELPQGVGDFGFRHIKKVLGFRGLQKDPKVRFWPPLFFPQTKPPVWFLTPWFFPLLIRGGKGAFGFKKVPHYFLMWGVNPFFTPQKKKKKKKKKKKKKKKKKKKKKKKKKKKK

SEQ ID NO: 277654 - protein, 126 aa, Glycine max
  Clone ID: PAT_MRT3847_92745C.1.pep
LVPNSARGEQRLNGISKSDKYKEQLEKMGLDSLLQDISDNGAKDEVSNRGFGINLFGEPCFKEVSVWELSLGLPTWEECLEVAVEKFELAGTSATDIAFIVKNHCSNETALEGFKIDEIVQAWTEM

SEQ ID NO: 277655 - protein, 51 aa, Glycine max
  Clone ID: PAT_MRT3847_92746C.1.pep
GSPKLKATFRLTKRSPLKKNRKQIFNNFSGVCPIGSQGTAPGNFYSPLSIK

SEQ ID NO: 277656 - protein, 104 aa, Glycine max
  unsure (1)..(104): unsure at all Xaa locations
  Clone ID: PAT_MRT3847_92747C.1.pep
MIIMLLIQSRKMQENGWQPRWFHRENENGTFRYIGGYWEARAQGRWXWMPKSLVKFMKNFDPFRCILISSGNVYIYSKACLIPSCMHVRYMYISASQVPQMKFV

SEQ ID NO: 277657 - protein, 133 aa, Glycine max
  Clone ID: PAT_MRT3847_92748C.1.pep
MVSLGAIYSVAYVFMLAATLVLGGDIVHHDDVAPRRPGCENNFVLVKVPTWIDGVENSEYVGVGARFGPTLESKEKRANLSRVVMADPPDCCTKPKNKLTNEIILVHRGKCSFTTKANIADEAGASAILIINY

SEQ ID NO: 277658 - protein, 185 aa, Glycine max
  Clone ID: PAT_MRT3847_92749C.1.pep
GFYARARASLYPVLRGVHGYPVFNNRVYHQTATRWLVQVTNLVDLAACAGKVANCRQTGVLANNGLGPVPAYPGWVNLPWRPGVSSYSGCSGALYYRCYCAGGYYSSTLPPRRRRARRAPPRPILLFDSIPYISTYPFLLLVLPTYCYSGCSYSLLKLLHPRRGPRPQTVLWVVACGCLYIVDMS

SEQ ID NO: 277659 - protein, 138 aa, Glycine max
  Clone ID: PAT_MRT3847_9274C.1.pep
SNPGNNAYMVAFAGQKYAARSLPIMFADNSHTITSFTLVLEFQEGTLQNLYWKSFGCDGCPSGSICLNQQDCAVPNKECQKNGGTACNMGIQLAFSGTDKNLDALNSWYEVQNLQQYSLYGLFSNLHDSIIGPYENLF

SEQ ID NO: 277660 - protein, 60 aa, Glycine max
  Clone ID: PAT_MRT3847_92750C.1.pep
MLRLYILLLLLGLSSISSWDRILKFYQALNIFYIKPTSGFNYATPSFNFSFLNVFYFGYP

SEQ ID NO: 277661 - protein, 45 aa, Glycine max
  Clone ID: PAT_MRT3847_92751C.1.pep
YIFISTSYNPKRGETLITTEALIISNSCHFFYHKTLTNILIHLIT

SEQ ID NO: 277662 - protein, 91 aa, Glycine max
  unsure (1)..(91): unsure at all Xaa locations
  Clone ID: PAT_MRT3847_92752C.1.pep
EGCSHRRPRXPLEXXADXXLXVMXEXEASYDXIXNAXKEESEGKLKGFLGYTXXXVVSTDFVGDSRSXIFDAKAGITLNKNFVKLVSXYDN

SEQ ID NO: 277663 - protein, 109 aa, Glycine max
  Clone ID: PAT_MRT3847_92753C.1.pep
MKDNKMLFIIFMIGTFTVGMAEYVVTGLLTQIADDMKVSISSAGLLISVYAISVALIGPLMRIITLKVHAHRLLPILVAIFIISNLVGMLAPNFNVLLLSRLMSCGMHA

SEQ ID NO: 277664 - protein, 60 aa, Glycine max
  Clone ID: PAT_MRT3847_92754C.1.pep
KAENFLYILDGIHFLVGLPRTNSFITRKRGVLIKGGVSQNQQPKKSLASHPGETGGLQDF

SEQ ID NO: 277665 - protein, 31 aa, Glycine max
  Clone ID: PAT_MRT3847_92755C.1.pep
GGTGFSVTLSSLCFLSSGSCQVRLQRFFSDT

SEQ ID NO: 277666 - protein, 182 aa, Glycine max
  unsure (1)..(182): unsure at all Xaa locations
  Clone ID: PAT_MRT3847_92756C.1.pep
MAIATCDHDKNAKALQFIEDMTQNTESVQERVLAEILSQNSQTEYLKRFELNGATDRDTFKSKVPVVSYDDLKHDIHRIANGDRSPILCAHPISEFLTSSGTSAGERKLMPTIRQEMDRRQLIFSLPMPVMNQYVTDMDXFKALIFXVTKAEQXTPSGLVARPVXASMYKSDQFXNRPYDPY

SEQ ID NO: 277667 - protein, 40 aa, Glycine max
  Clone ID: PAT_MRT3847_92757C.1.pep
KGALRVKSWSRGDAHLLKFRCGTTHWGLDSLYWEQTALPT

SEQ ID NO: 277668 - protein, 59 aa, Glycine max
  Clone ID: PAT_MRT3847_92758C.1.pep
LHSLITCLYLPLLLFPNLPLFQSSIASGGLIVDKVEDGHWKTIHMLPLSQLMLGHLSSQ

SEQ ID NO: 277669 - protein, 54 aa, Glycine max
  Clone ID: PAT_MRT3847_92759C.1.pep
GSWVCACSVTVRSASSSTVWFERASDAHRSVDNPCLSVSYSSRTALCVCLHSES

SEQ ID NO: 277670 - protein, 120 aa, Glycine max
  unsure (1)..(120): unsure at all Xaa locations
  Clone ID: PAT_MRT3847_9275C.1.pep
GKEGTFGNTGGWPPPTLAAGSTGGGSREDWEINRALFXVAGGPLPYETNGAGWGRIRTGAPNLVNMDEREPAPLPFSLRPTFFEKVGPPPFGAGGENFYMADALSRGSKIMGPSRALLLK

SEQ ID NO: 277671 - protein, 221 aa, Glycine max
  Clone ID: PAT_MRT3847_92760C.1.pep
KIPSFLLQASGLMLSENNFSDLFSFLCDQSTASNLATLDVSRNQIKGQLPDCWKSVKQLLFLDLSSNKLSGKIPMSMGALVNMEALVLRNNGLMGELPSSLKNCSSLFMLDLSENMLSGPIPSWIGESMHQLIILNMRRNHLSGNLPIPLCYLNRIQLLDLSRNNLSSGIPTCLKNFTAMSEQSIDSSDTISNIYWNNQTYLEIYGGYRYGGYTLDITWMW

SEQ ID NO: 277672 - protein, 70 aa, Glycine max
  Clone ID: PAT_MRT3847_92761C.1.pep
ETKDVFRADRRLGEVFPSHHPHSTCLFYGIHGTPAIEYNGPRVVLSIIPQGCDTSPPSEPFMSVPISHAP

SEQ ID NO: 277673 - protein, 65 aa, Glycine max
  Clone ID: PAT_MRT3847_92762C.1.pep
QRQIHRLFNLLHRHRWQIAPGLTVRLVGLDCSLYIITCSCKYGANCRSPPPDRYAKKKKMLVYAP

SEQ ID NO: 277674 - protein, 62 aa, Glycine max
  unsure (1)..(62): unsure at all Xaa locations
  Clone ID: PAT_MRT3847_92763C.1.pep
WRFILQRGLQVEADVPVESFELSPVDQIFVRXGQSTFLIKLSKTASILSSATHNSLVALDEL

SEQ ID NO: 277675 - protein, 52 aa, Glycine max
  Clone ID: PAT_MRT3847_92764C.1.pep
EISGRPIIRTNGARVSYDPRWSLASTIGPRVAHLSHAVEPDNETLMSSLAAV

SEQ ID NO: 277676 - protein, 62 aa, Glycine max
  Clone ID: PAT_MRT3847_92765C.1.pep
SLFLLCGVGLVNGVIIYFKLCKEINSLFIIIRNNVNCWFLNFEFMHFCTSSLLYITWMYILR

SEQ ID NO: 277677 - protein, 68 aa, Glycine max
  unsure (1)..(68): unsure at all Xaa locations
  Clone ID: PAT_MRT3847_92766C.1.pep
IFQAGGLIQFKYCQGKLKRVRLRFIQMLAVVKAIRTLVPGGYQTPTPKLVKKTRVLFFXXKENNKKXK

SEQ ID NO: 277678 - protein, 51 aa, Glycine max
  Clone ID: PAT_MRT3847_92767C.1.pep
VPVFANHENNVLKQAQFMLCFLTPRICGYVHETTNRTSFVCCPTLTSKSFP

SEQ ID NO: 277679 - protein, 52 aa, Glycine max
  Clone ID: PAT_MRT3847_92768C.1.pep
KPSELSASPQIKNREKNNFIYFIPLLKNFVYNLAQLEYPFGNWGLPKTEFWA

SEQ ID NO: 277680 - protein, 159 aa, Glycine max
  Clone ID: PAT_MRT3847_92769C.1.pep
MERCLLLQTLAFALVAVVCMFNFLVNATTDPNEARVLNAIFDKWSIIANHEHWNISGDLCSGRAIDDTSITDQTYNPFIKCDCFRNNNNTCHITKLKVYALSVVGEIPDELWTLTYLTELDLRQNHLTGSISSIGNLTRMDLTFGINALSGELPKEKTF

SEQ ID NO: 277681 - protein, 75 aa, Glycine max
  unsure (1)..(75): unsure at all Xaa locations
  Clone ID: PAT_MRT3847_9276C.1.pep
MRECISIHIGQEPIXVGTACWELYCLEHGIGPDGQMPSDKTVGGGDDAFNTLFSETGAGKHVPRAVFVDLEPTVI

SEQ ID NO: 277682 - protein, 170 aa, Glycine max
  unsure (1)..(170): unsure at all Xaa locations
  Clone ID: PAT_MRT3847_92770C.1.pep
GGHPDPKLTYGKEVGARMGLGKTEHQEEPTERGADTDGDAERNMVLGKRDIVTPTDSEAMIDVNADEAITYLXAGIKGVARSMPTSAALDDVSKHLKLKLFEGPTGRKCIGNLMDAGIWTDWGEEKVGTGTEQISEKDGIWAIYGWVYINAYKNRDKLEDKIGTVEDRTR

SEQ ID NO: 277683 - protein, 87 aa, Glycine max
  Clone ID: PAT_MRT3847_92771C.1.pep
QVQFSKEPKMHPSRAEAAASQPCFNGCFPSPLLASEKSHRTTSSKPKVVNNNNVTSSHDDFVAATSSTLHPHPNFTNHESLPSLQDS

SEQ ID NO: 277684 - protein, 56 aa, Glycine max
  Clone ID: PAT_MRT3847_92772C.1.pep
RTGSQPIDGHATKGGLSTGHPTHGHAEHHPHNHNRRIVSLQYHNILISLIHSSTRF

SEQ ID NO: 277685 - protein, 314 aa, Glycine max
  unsure (1)..(314): unsure at all Xaa locations
  Clone ID: PAT_MRT3847_92773C.1.pep
GPLLHGADHWIGWMRTRVNLKEESVGIEIEAKSLFWKXWCKRFTLQYDQIPTNHIHCKITRKVYKNRPFCEAKDPDTAWYTKMDICLTPLPEVNDIREVSGGELPKWPQRLKSVPPRISSGSLKGITGIRLREDDRRGKKRVAYYKTLDYQLAERGRYRNLLDMNACLGGFAAALIDDPVWVMNTVPVEAEVNTLGAIYERGLIGTYMNWCEAMSTYPRTYDFIHGDSVFSLYQNRCKVEDILLEMDRILRPEGSVILRDDVDVLLKVKSFTDAMQWESRIADHEKGPHQREKILFAVQDEFGYKSVVFQWKGI

SEQ ID NO: 277686 - protein, 174 aa, Glycine max
  unsure (1)..(174): unsure at all Xaa locations
  Clone ID: PAT_MRT3847_92774C.1.pep
MICSLAVTTANRAGAGMVAPFTGLNSMAGLPTTKTNTDITFIACIGGIEQCMQVWPPLGKKKLETLSYLPYLDDAQLAKEVKYLLRKGWIPCLEFNLDHSSVYREHNTSPRYYDRRYCTMSNLTMLGCTDASHVLNELHXAKTAYPNGSVRIIXFDNATQVQCITFIVYNTPAY

SEQ ID NO: 277687 - protein, 73 aa, Glycine max
  Clone ID: PAT_MRT3847_92775C.1.pep
TVKKWKTEETAKRLMTEGTAWRNIPILKKNEKKPGDKPALLFRPEKKRTASLKWLPPRTRRGMKGIHTTGTHL

SEQ ID NO: 277688 - protein, 50 aa, Glycine max
  Clone ID: PAT_MRT3847_92776C.1.pep
RARAKAKAKAKANNLHFRRFIFLIWFGKGNWTFFNRVFGFSKKIKPLWVS

SEQ ID NO: 277689 - protein, 86 aa, Glycine max
  Clone ID: PAT_MRT3847_92777C.1.pep
GLPMEDENDLPMKGYQQELIPGPLSQGCLILPVEPHSLASLKDSLFRYFSDAILLRVPFYRNLIMEFVHYRLNFLWFLFKCRFEKA

SEQ ID NO: 277690 - protein, 78 aa, Glycine max
  Clone ID: PAT_MRT3847_92778C.1.pep
FRLRMSSMDSRQVSTHVAKANMDTSYAIGGSLALGSAYMLLLVSARVTLRPIKHTYPTAWWLLYNLVQPTHLHNLPLI

SEQ ID NO: 277691 - protein, 193 aa, Glycine max
  Clone ID: PAT_MRT3847_92779C.1.pep
MDDSHNRKRLRHHSPKHPRLCSNSSDTHPLDSPQFQLSRVDPDLLNMLNDAENVTERDPTMQGLDSVIKSFEEEILSPLPNPNLASEAEVFNPNLGYLLEASDDELGLPPAVAPGEDATNPQTLDSGRVGSDGVDLTGFLGFEDDIVNCGGFGLTGYDDVEGDGGGYVTIDGLFDYAEPGADILWRSESLQAM

SEQ ID NO: 277692 - protein, 68 aa, Glycine max
  Clone ID: PAT_MRT3847_9277C.1.pep
FTNFFYKGKPKIPQGKIFFFRNFSKNKQITGFIIFQRQGKLFDTLYPKTPTTVLRGAVFTLYFNMNAL

SEQ ID NO: 277693 - protein, 55 aa, Glycine max
  Clone ID: PAT_MRT3847_92780C.1.pep
DGDSYNDTCNANRAGLSATYDARGKPTVMPWPQMTLTLTGNDYPFVDDNYIQLEC

SEQ ID NO: 277694 - protein, 53 aa, Glycine max
  Clone ID: PAT_MRT3847_92781C.1.pep
YIYIYIYIYIYIYIYENESNYIAIILITITQIYNFQLNNVFLKFTIGLKVRFT

SEQ ID NO: 277695 - protein, 34 aa, Glycine max
  Clone ID: PAT_MRT3847_92782C.1.pep
SAAMVSLIACVEPTAIAPLGSPSFAATNLLPHEW

SEQ ID NO: 277696 - protein, 89 aa, Glycine max
  unsure (1)..(89): unsure at all Xaa locations
  Clone ID: PAT_MRT3847_92783C.1.pep
LLAFVSGAWCSGLSAVSFCSWFRVRAFPWCRLFLPXVLLCAWGVSWGVSXCXXVLWWFGFXSAHAPSGFPFLFRHLTRVGRPGPSGPVR

SEQ ID NO: 277697 - protein, 83 aa, Glycine max
  Clone ID: PAT_MRT3847_92784C.1.pep
LEFRGRRHSFVLLLKKPQYCSSSLTSLFMGGFFLLLEGSLLFLYLFYPTPFIVSYRESKYYHLFYFQSLLLMFFSLLKTHIEF

SEQ ID NO: 277698 - protein, 100 aa, Glycine max
  Clone ID: PAT_MRT3847_92785C.1.pep
MELLGYLNQGHPSRGTTLVITLSLVLSTLVSFSTFTHAFSSSAFPELNPIKPRHSRLLRSAVQHETPTSQLSEIWSPLESQGWKPYVESNKPTLPEKSEG

SEQ ID NO: 277699 - protein, 108 aa, Glycine max
  unsure (1)..(108): unsure at all Xaa locations
  Clone ID: PAT_MRT3847_92786C.1.pep
ELNPIKPRHSRLLRSAVQHETPTSQLSEIWSPLESQGWKPYVESNKPTALPEKSEGYIQVFLDGGLNQQRMGICDAVAVAXILNATLVIPYLXXXPVWRDSSFFMDIF

SEQ ID NO: 277700 - protein, 67 aa, Glycine max
  Clone ID: PAT_MRT3847_92787C.1.pep
FFCHYVQVNQQIAYMHKDQLSCKYSYLRSTSIFISISRLASTLVCSNLAMLLCSIVDLYLQVSKRPT

SEQ ID NO: 277701 - protein, 87 aa, Glycine max
  Clone ID: PAT_MRT3847_92788C.1.pep
PTRPLAVNVDLEIVGDGEYVLKIKRVNPSLTNHDEVERAKHMAQNGAMLLHYGEILQDMGEKLISQSQASLYSVFKMPTPPKLKSDQ

SEQ ID NO: 277702 - protein, 103 aa, Glycine max
  unsure (1)..(103): unsure at all Xaa locations
  Clone ID: PAT_MRT3847_92789C.1.pep
GNLQLAYDALQRSFATDQNASLTNGDITLWYRPPEWLLGTTKCGPAADLRPVEGISAELLQGKPIFAVDDEPHQYXTYLSLGGAPEEAPRTEATRTPYYNICM

SEQ ID NO: 277703 - protein, 99 aa, Glycine max
  Clone ID: PAT_MRT3847_9278C.1.pep
VKLVQPQATAMHVGAIEIIIDSFASPDCNIVGAMLLVDTYHTNPENAVRSIFVAPFTGGRPIPVVTFPNTIEHIEPDMNSRFQPLSTTSNGDFVQGKDL

SEQ ID NO: 277704 - protein, 58 aa, Glycine max
  unsure (1)..(58): unsure at all Xaa locations
  Clone ID: PAT_MRT3847_92790C.1.pep
RKKTYFSLIILGKXKLLHRPFFWIKKIKKNWNFLGTRRKWGLFLARKGNDDKDSTCFF

SEQ ID NO: 277705 - protein, 67 aa, Glycine max
  Clone ID: PAT_MRT3847_92791C.1.pep
PLLYLYFFSFFQTQLLQATDNGFLAWRRISKLRPHITAKLNLKKKLPLPFIGAPLFHVSPTIILMLG

SEQ ID NO: 277706 - protein, 36 aa, Glycine max
  Clone ID: PAT_MRT3847_92792C.1.pep
GWNRRRVIIIILLEEQINDYLYVTSNLARQKILSIY

SEQ ID NO: 277707 - protein, 192 aa, Glycine max
  Clone ID: PAT_MRT3847_92793C.1.pep
KFSPFNARHGIDVRDRRSTNPEHPIVFSEPLQRTRSFCTLGHYFVLSSSSIASFFFRQDHRFIGDSTHRRLWHHTTTAQLLGTHTVASAHSQGPEAVGCSLLPCGPDPAGSLPPRQLREGLLGWPRAWEGEASRRVQEGPGPGWGSPALTPGTVASAAVSAPSSGWSLGFRQPGTSRPRSCEWPPGKPGCCH

SEQ ID NO: 277708 - protein, 190 aa, Glycine max
  unsure (1)..(190): unsure at all Xaa locations
  Clone ID: PAT_MRT3847_92794C.1.pep
MLLLLLLLIHSLLITQSTPCRTSCGDIPMGGGXXXPXFXXHTNKNNXXXXXXTPPGRTXXXKNXGHXXSXADPNILITDPFMWNWDDGENYRPTRPFSLDTSTRFKLSPHNEYLFFNCSEDHVIVKPKPIFCERFPERCDSSCDSGSYLCRHMPGCSFAMSGSSCCSYSPRATESLRLMLKYCTSYTSVY

SEQ ID NO: 277709 - protein, 161 aa, Glycine max
  Clone ID: PAT_MRT3847_92795C.1.pep
TLGYDRHPAVHHLNGEVAPGALVAVIGPNGAGKSTLLRGIVGILRPLDGSIHLGGLDSRDIAYLPQSAEIDRSFPISVFDFVGTGLWRGTGLFGGIGKAAREKILRAIGAVGLNGFENRPIGTLSGGQMQRVLFARVLLQDARLIALDEPFNAIDSQTTTD

SEQ ID NO: 277710 - protein, 60 aa, Glycine max
  Clone ID: PAT_MRT3847_92796C.1.pep
QCVSQDNKYNRKCFKVRNFIGLIEKSLECHNVYIIIYHSPTRTLIFPPNFVHKSYIQNIN

SEQ ID NO: 277711 - protein, 54 aa, Glycine max
  Clone ID: PAT_MRT3847_92797C.1.pep
NKYIIHLYNGPCILVSLGKRIKLSPISIDYKNIFLFIYLGYRNLNFYLSFSYNI

SEQ ID NO: 277712 - protein, 40 aa, Glycine max
  Clone ID: PAT_MRT3847_92798C.1.pep
TAGAPFLRHSTELNHGLWSVLHLQGSETCKDPWIARRSFT

SEQ ID NO: 277713 - protein, 114 aa, Glycine max
  Clone ID: PAT_MRT3847_92799C.1.pep
MPSHADLERQIEQLMECKPLSESEVKALCDQARAILVEEWNVQPVKCPVTVCGDIHGQFYDLIELFRIGGNAPDTNYLFMGDYVDRGYYSVETVTLLVALKVRYRDRITILRGN

SEQ ID NO: 277714 - protein, 83 aa, Glycine max
  Clone ID: PAT_MRT3847_9279C.1.pep
LRGPRLPSVRWRRFFLYLRLRLLLLLSQTDKIKHVNERIYRRLHEQASKPPFFTLQMIVIVELRQGLLLFTRLDDSAILPYFF

SEQ ID NO: 277715 - protein, 65 aa, Glycine max
  Clone ID: PAT_MRT3847_927C.1.pep
NKMRNRNFILAIFLFVERFIVLPWICKISHDNLFYLSITVFVYGSCWTKINYSFYPSLYTGIRQH

SEQ ID NO: 277716 - protein, 77 aa, Glycine max
  Clone ID: PAT_MRT3847_92800C.1.pep
SMDILQVLVESGTSETLLISYAYFIFLYRAIYVKSILRVFFPLILLVWHIKKDTRGAMSCLHCLWTCASKVYKLPFP

SEQ ID NO: 277717 - protein, 333 aa, Glycine max
  Clone ID: PAT_MRT3847_92801C.1.pep
IQISCCLRFESNTFNRMLGKDKTATSLEEVDALPAIYATVLKFSSSAPYGSIPSYRIPFLLGEPYNKDSASQDASLSIVPVDVGNDSQEEEKYRAIVEIDLEPREPTPGIVDVHIETNAENSQIIQGQLQGITVGIEDMFLKAIVPTDIPEDEIPRYNFDLFNTLWEACGSSSSTGRETFQLKGGKGIAAISGTQSVKLLDVPATSLIQATERHLAHFVVGVSGEPLIDAIWEGGIIQNVIWEDASPDATSVTNHDTGPLRLTYNDEEYEKGAISNSRKRNLGCFLVLIFLPPRFHLLFQMEVGDVSTLVRIRTDHWPSLAYIDDYLEALYLS

SEQ ID NO: 277718 - protein, 77 aa, Glycine max
  unsure (1)..(77): unsure at all Xaa locations
  Clone ID: PAT_MRT3847_92802C.1.pep
FHLHPSFVEIESHQNLACKQIIIYHFFSMNFRFNNFPDTKLLLSSHSLPVNFSLSFFVRAKLSEXASGSXXXXVPFX

SEQ ID NO: 277719 - protein, 118 aa, Glycine max
  unsure (1)..(118): unsure at all Xaa locations
  Clone ID: PAT_MRT3847_92803C.1.pep
FSAQTIRAEINKKVRQVYEMYSKAAGLAAEIERNRKDSQSYAGMKRKACGXLGMRCYDVDLXNKTDXAELIKQVHHVNAHPDDHGISVQVAVAKHINEEEVLTDISLDKDVDGCHPLN

SEQ ID NO: 277720 - protein, 74 aa, Glycine max
  unsure (1)..(74): unsure at all Xaa locations
  Clone ID: PAT_MRT3847_92804C.1.pep
MNFCTENLTATGLRPYGPRLNTINISSVKHXLLQTPICLAYLASHDPTVIHIDLKCDYNHINGNQWEHEIGDLG

SEQ ID NO: 277721 - protein, 63 aa, Glycine max
  unsure (1)..(63): unsure at all Xaa locations
  Clone ID: PAT_MRT3847_92805C.1.pep
PGRFESFFQSSMEVQQSYLQGFSRNIXKASNITKSKRLTKVLLIKEEGHHQGNXKLPENVIVE

SEQ ID NO: 277722 - protein, 39 aa, Glycine max
  Clone ID: PAT_MRT3847_92806C.1.pep
CFIPLNYKVKFKCLLICTPVSKWGIIYNSSPFPQKGNLL

SEQ ID NO: 277723 - protein, 93 aa, Glycine max
  Clone ID: PAT_MRT3847_92807C.1.pep
KAQRPQATGICGIKALLKDAGVCAVATADSAVLASNAMAIEVLLGTDDGYLGFSPNSLSADPEEKIVFKNNARLHHNIAFDEDDIPSGVDARK

SEQ ID NO: 277724 - protein, 57 aa, Glycine max
  Clone ID: PAT_MRT3847_92808C.1.pep
RRLLARRSGGTPSPYRLAFRRSARAVTFRKSTSTSRPFSERSADLTRILVAKLKSWV

SEQ ID NO: 277725 - protein, 128 aa, Glycine max
  Clone ID: PAT_MRT3847_92809C.1.pep
DLPATLEPFSDQLRYIEWIGYPFQSPSPFFAKFLVEIPMPHSKLKQLWQGIQELDYLQEIELGECKQFEEVPDLSKAPQGFCGKIAGRSGNQHRSSNVAILLCWLRWHHSVRKLIPFLFLSFSPRQYA

SEQ ID NO: 277726 - protein, 47 aa, Glycine max
  Clone ID: PAT_MRT3847_9280C.1.pep
YIILSVSKYHVKIFYLGGPHVSFIFLIFLLSYIFVLFFSKRYFPESQ

SEQ ID NO: 277727 - protein, 103 aa, Glycine max
  unsure (1)..(103): unsure at all Xaa locations
  Clone ID: PAT_MRT3847_92810C.1.pep
PPQKKKFSFFINPPEFFGKKDTFPQKMFSGFFFGKGGPKGFPPVLHKGVFKVLHLEAEGARPSMGLGPHILFEILGVAPKGLWLPPSSPPNLGEKARSLFXKG

SEQ ID NO: 277728 - protein, 61 aa, Glycine max
  Clone ID: PAT_MRT3847_92811C.1.pep
MGLFGGPFFLPRPNGFFQFGGAPLFFWGNFFFKKKKKKKKKKKKKKKKKKKKKKKKKKKKK

SEQ ID NO: 277729 - protein, 196 aa, Glycine max
  Clone ID: PAT_MRT3847_92812C.1.pep
VDHPHGRLTHHLCRPLAGCENQYAYTYWLHTALGYLHLASIARHQLQFRQLGLLALLQIQVLPSSVPFLIRCSVKSLQRSYARLPVGVPRTSFFLVCNLPHYLLLAVILQPNPSPISLIWLPIRHICPFTVMYYLAVPCIRHAPVIFLSHRSFFFDSSLSLRSPISLFRSSHPTPLINRAPPPPQAGGTATHVERQ

SEQ ID NO: 277730 - protein, 169 aa, Glycine max
  Clone ID: PAT_MRT3847_92813C.1.pep
FTGSSVLEVLPHTSKLRCEKSTDEVIQKFFEYGSPEQRKELANRLLGQILPLSLQMYGCCVIQKALEAIDLEQKAQLVHELDGNVMRCVRDQNGNHVIQKCIESIPTKNIDFIIFAFRGQIALLSMHPYGCRVIQRVLEHCSNEGQCQFIGDEILESIFTLAQDQYGNY

SEQ ID NO: 277731 - protein, 378 aa, Glycine max
  Clone ID: PAT_MRT3847_92814C.1.pep
MKRSPASGRNGGLLSGWQVQRSFDSAHDPKIANFLEDLKSGKSRRFELSDIIGHIVEFSSDQHGSRFIQQKLESCSVEEKALVFKEVLPHASKLMTDVFGNYVIQKFFEYGSSEQRRELADRLVGQILPLSLQMYGCRVIQKALEVIELEQKAQLVHELDGNVMRCVRDQNGNHVIQKCIESIPTKKISFILSAFRGQVATLSMHPYGCRVMQRVLEHCTDESQCQFIVDEILESVCALAQDQYGNYVTQHVLERGKPQERSQIINKLSGHIVQLSQHKFASNVVEKCLEYGDTTERELLVAEIFGHDEKCDNLLTMMKDQFANYVVQKVIDICSENQRAMLLSHVRIHAHALKKYTYGKHIVARLEHQFGENQTPSS

SEQ ID NO: 277732 - protein, 322 aa, Glycine max
  unsure (1)..(322): unsure at all Xaa locations
  Clone ID: PAT_MRT3847_92815C.1.pep
PRVRNSGAYLDDKKLHNQKTGANLNSNRDGLIHPGYFGHPSNLGFVPQYPSSPLCRPVLSGYPESSPGLLGGRNEMKRSPASGRNGGLLSGWQGQRAFDSAHDPKIAIFLEELKSGKGRRFELSDIIGHIVEFSTDQHGSRFIQQKLESCGVEEKELVFKEVLPHTSKLMTDVFGNYVIQKFFEYGSPEQRKELANRLLGQILPLSLQMYGCRVIQKALEVIDLEQKAQLVHELDGNVMRCVRDQNGNHVIQKCIESIPTKNIDFIISAFRGQIALLSMHPYGCRVIQRVLEHCSNEAQCQVIADEILESVFTLAXDQYGNY

SEQ ID NO: 277733 - protein, 89 aa, Glycine max
  Clone ID: PAT_MRT3847_92816C.1.pep
KAEKTPEILAPPIEGMAPLIKFYLGGGNFISPFTPSPLWSRAFPGTLFKPHLKKTPFGGKNPLPKGVKLKTPGVQKTLYSPREEPLGPP

SEQ ID NO: 277734 - protein, 120 aa, Glycine max
  Clone ID: PAT_MRT3847_92817C.1.pep
KPNHFKFYYGLVFCFFIGLPPRKTFWLGSRGQFLGKPRNFFGGSFFLRNFFVKKNLFGENFFHFKTPPPPKGGTVPGSFCTTKLKNFLRGNGSQPGGPFLKNPLNFFPHTLGDMAKFSPF

SEQ ID NO: 277735 - protein, 71 aa, Glycine max
  unsure (1)..(71): unsure at all Xaa locations
  Clone ID: PAT_MRT3847_92818C.1.pep
NTSASSLWYVLGYMETKXRLKKGDKVVKYXMISFGAGFKXNSCLWEVKKDLGDTKLHQWDNCIDGCTFEIT

SEQ ID NO: 277736 - protein, 92 aa, Glycine max
  Clone ID: PAT_MRT3847_92819C.1.pep
KIQELLPLLPTSQAWYLEKQVLIIKKTPPKGGKGLYGQKKMPGGGSEKNWIIGKKTLPSNQKIFKTRPPWGAKKGGKTTLPTALTLVRIFKE

SEQ ID NO: 277737 - protein, 69 aa, Glycine max
  Clone ID: PAT_MRT3847_9281C.1.pep
FLFNRDHRLPHLKSGNKSHRYLISRVFQCLATYWCTMSKGNENHSLCWPQTTGIIFFSTLSLFAEHSPI

SEQ ID NO: 277738 - protein, 47 aa, Glycine max
  Clone ID: PAT_MRT3847_92820C.1.pep
RNSESCYTYHTANMDAVVDVSLEDVTDNNKTSYTANTRGRGRDSGPG

SEQ ID NO: 277739 - protein, 36 aa, Glycine max
  Clone ID: PAT_MRT3847_92821C.1.pep
PTWMYFVICNQLMTKTVFGLFYNFGPRPPLKVIFLF

SEQ ID NO: 277740 - protein, 93 aa, Glycine max
  unsure (1)..(93): unsure at all Xaa locations
  Clone ID: PAT_MRT3847_92822C.1.pep
SLAXPPGXKSFSITPARSLARLEPGXDKEVAKRRGREDFGRLKVSLFCVCTKLGTRAELKRNPLSAGRGXRGRGGRXSDTXSLLPLSCCFFLL

SEQ ID NO: 277741 - protein, 75 aa, Glycine max
  Clone ID: PAT_MRT3847_92823C.1.pep
LTIPATLITWRSATLWKVKRYIYRQGLSWSQCTIVYQSNGAQAFLCPSHGGSPSLAYEHLNEESMHRLHKAPLLQ

SEQ ID NO: 277742 - protein, 106 aa, Glycine max
  unsure (1)..(106): unsure at all Xaa locations
  Clone ID: PAT_MRT3847_92824C.1.pep
GALSLAVNKLAHNAIKLGGMGLGAFFFGWLVAMAVINLWIWDRPNGKTNFLTALLIPYIFLSWPXLILDVFRGELGKWMAAVAVELRLFFPRHFLDGLEWPGALIL

SEQ ID NO: 277743 - protein, 81 aa, Glycine max
  Clone ID: PAT_MRT3847_92825C.1.pep
SENWRTILKISKSLRLSFVQLKKPYQVGVCCLSSLCVLSVPFVFEYIGFFLLISSQGTPTISSVASLWFSLWFWFGFLLLF

SEQ ID NO: 277744 - protein, 120 aa, Glycine max
  unsure (1)..(120): unsure at all Xaa locations
  Clone ID: PAT_MRT3847_92826C.1.pep
RSIETKPNVELSISSPTMLDSLTCSPNVSTLCSDYGNXNMRDQSAASXLCSTYLTVLSYWYSALGSPLNYPRQTSRICRXELVIXXITKPNDLNXXCQGIASILLYKFWTPPLTLCRXWS

SEQ ID NO: 277745 - protein, 63 aa, Glycine max
  Clone ID: PAT_MRT3847_92827C.1.pep
KLDILLQCIGGYLDKGHSIGDGVNTLAVFALIPVAVFSNLVLAHSNMLQHGRPMVGMITQKLV

SEQ ID NO: 277746 - protein, 67 aa, Glycine max
  unsure (1)..(67): unsure at all Xaa locations
  Clone ID: PAT_MRT3847_92828C.1.pep
CCVEVGIWILSVEARAACGGGRRSEPGRGEAVGVGXGXXXXXISYVVWRECVVLCMKRGPYNAMEWK

SEQ ID NO: 277747 - protein, 707 aa, Glycine max
  unsure (1)..(707): unsure at all Xaa locations
  Clone ID: PAT_MRT3847_92829C.1.pep
MEHHFGQGTTPASESFDKARVLNVKPLRTLVPVFPSPSNPASSSTPQGGAPFVCVSPSGPFPSGVAPFYPFFISSESQRLSEQNAQTPSGQRVPAAPVSTAVPINSFRTPTGAANGDVGSSQKNTRSRGWVTEEDGYSNVEIEEIDADEGTGTGRSKRKSNKKTKARQSGGSVSVDVDPDAVAADILKSLNALVFDVLSQPEGSRDSVAYTLMIYEVMRRKLGQIEDSNRAANSGAKRPDLKAGAIMMNKGIRTNSKKRIGVVPGVEIGDIFFFRFELCLVGLHAPSMAGIDYIGKTSQEEEPLAVSIVSSGGYEDNVEDGDVLIYSGQGGVNRDKGASDQKLERGNLALEKSAHRGNEVRVIRGLRDPQHPTGKIYVYDGLYKIQNSWVEKAKSGFNVFKYNLVRLPEQPQAYMIWKSIQQWTEKSASRAGVILPDLTSGAENVPVCLVNDVDNEKGPAYFTYIPTLKNLRPTAPVESSTGCPCVGGCQSKNFNCPCIQKNGGYLPYSSALLLADLKSVIYECGPSCQCPSNCRNRVSQSSLKFRLEPFRSTNKGWGLRSWDSIRAGTFICEYAGEVIYIAKPKKLGGDNANYLIFDSTHIYLQLEVFPDDTDSSXKFPSPLYISAKNEGNVSRFRNHSCSPNVLWRPVIRENKNESDLHIAFYAIRHIPPMMELTYDYGTVLPLKVGQRKKKCLCGSVKCKGYFC

SEQ ID NO: 277748 - protein, 159 aa, Glycine max
  unsure (1)..(159): unsure at all Xaa locations
  Clone ID: PAT_MRT3847_9282C.1.pep
FSVGIPGNTGLSLACAMNSSLRGRARSDIYTICSQDCELWNSACTKAMTMSFNPNTCSDAWSLECLKRTXFHCDIICVTGWTATXMQDVQDTIDWFISXSHECGSRTYCVLNSQNTNVXNRWMGKLTLPQGTSLNVKRMPIFIMARSWCKNAILMNMPN

SEQ ID NO: 277749 - protein, 75 aa, Glycine max
  Clone ID: PAT_MRT3847_92830C.1.pep
SRIASSRPLFFFFCKRIEYQDDKQNRQFYRSSLILSCGLQKSLLKIHTQKIKGYLLTAEKETIYTKCVLQLTFTP

SEQ ID NO: 277750 - protein, 53 aa, Glycine max
  Clone ID: PAT_MRT3847_92831C.1.pep
LNIIRGCVTCVVSNSYYHFWYLFAQFIRNKYLPFNVCPKKNLCTRPIIYAIYK

SEQ ID NO: 277751 - protein, 72 aa, Glycine max
  unsure (1)..(72): unsure at all Xaa locations
  Clone ID: PAT_MRT3847_92832C.1.pep
STPIIVXCTPIIFLMCTTQSGXLNQPGHRVFXKLAGLGRAIPGHMHERSNSETSPGXTGPFGLADRXRXXXX

SEQ ID NO: 277752 - protein, 44 aa, Glycine max
  unsure (1)..(44): unsure at all Xaa locations
  Clone ID: PAT_MRT3847_92833C.1.pep
FFTVVISTYVPCNPPPKTAXHLPVPDPPFPKHASCPKYTIKLGA

SEQ ID NO: 277753 - protein, 65 aa, Glycine max
  Clone ID: PAT_MRT3847_92834C.1.pep
RKLLATGSRLFNFFYEKKKKGLFNGLLKKLTYSQGFWGGGPPRGRRNGSPHLLSFYPKKNIFNLF

SEQ ID NO: 277754 - protein, 46 aa, Glycine max
  Clone ID: PAT_MRT3847_92835C.1.pep
SSHFKFIAYIPNLYRRNPGSFKTHTTHPLTSHFNNILDTHTQLLSN

SEQ ID NO: 277755 - protein, 141 aa, Glycine max
  Clone ID: PAT_MRT3847_92836C.1.pep
MLIKGHQIKAPILVLNLFLVLICSTASSVNVVESRKLDETTPVPATNGTEEKCGSCGGTTYPSPPPPLLPPPSPPPPSPKKTPPSQYCPPPPPSSFIYITGPPGNLYPVDENFSGATSHHRSFAAVLMPLLVGLFSTLAFL

SEQ ID NO: 277756 - protein, 95 aa, Glycine max
  unsure (1)..(95): unsure at all Xaa locations
  Clone ID: PAT_MRT3847_92837C.1.pep
XGTREEHFFWXRGLAGRRGDKGSLGTRQSSGASGIIGSLCTRIQLIXXSTANQLTTNWGNHWNKMMEEEAGERKTGTDETTQRAQTERGRKSIGT

SEQ ID NO: 277757 - protein, 55 aa, Glycine max
  Clone ID: PAT_MRT3847_92838C.1.pep
MACLNDAFLAAHLSMDVVSAPMAHAAMTCGQETSNLDNCIGYLQNGRTPSSACCN

SEQ ID NO: 277758 - protein, 59 aa, Glycine max
  Clone ID: PAT_MRT3847_92839C.1.pep
KKIYMPKEKGFSGSKKNPLKVMCQGCQSCPVKEFKTFKGVKRKNLLKRFLKTLKREKKI

SEQ ID NO: 277759 - protein, 118 aa, Glycine max
  unsure (1)..(118): unsure at all Xaa locations
  Clone ID: PAT_MRT3847_9283C.1.pep
HSLKLTAMHVGAIEIIIDSFASPDCNIVGAMLLVDTYHTNPENAVRSILVAPFXGGRPIRVVTXFPNTIVHIEPNMNSRFQLLSPTTNGDYVXGKESPKVKVNVTCAVCGLTSXYTPT

SEQ ID NO: 277760 - protein, 62 aa, Glycine max
  Clone ID: PAT_MRT3847_92840C.1.pep
IVNVSSPPTAQVFVDDFPLSLTHCFNLRVSPPLLCLWESPVKHSQKKNPLYNCLVFLEKTPF

SEQ ID NO: 277761 - protein, 50 aa, Glycine max
  Clone ID: PAT_MRT3847_92841C.1.pep
MNILRSFWNSPTGLKTTHFWGPAFNWSLPFAAAMDTKKPPETISVNMTGG

SEQ ID NO: 277762 - protein, 103 aa, Glycine max
  Clone ID: PAT_MRT3847_92842C.1.pep
FNRNTGFSLGPNCYYIGPQHRYHFIYLQLPFSSSFHRAITIFPPFGCMGFASNNICVGLSHKAYVAPPCFGQDWIPLTIFAGTGMTIILGYDRFRFPMRFLEV

SEQ ID NO: 277763 - protein, 197 aa, Glycine max
  Clone ID: PAT_MRT3847_92843C.1.pep
MVHVSFYRNYGKTFKKPRRPYEKERLDAELKLVGEYGLRCKRELWRVQYALSRIRNNARNLLTLDEKNPRRIFEGEALLRRMFRYGLLDETQNKLDYVLALTVENFLERRLQTLVFKSGMAKSIHHARVLIKQRHIRVGRQVVNIPSFLVRVDSQKHIDFSLTSPLGGGRPGRVKRRNQRAAAKKAAGGDGDEEDED

SEQ ID NO: 277764 - protein, 122 aa, Glycine max
  unsure (1)..(122): unsure at all Xaa locations
  Clone ID: PAT_MRT3847_92844C.1.pep
ARXRLEHFSFSSSRSNMESKAICFCIRVRKSKSKESKVKDLEKLSHVKPNHKGKTKGCTSTTPVGDGGGINVHGANTVANNDVGVAAAEMTAAHTSLMSANGVQDGSGHGHGGESGADGDVG

SEQ ID NO: 277765 - protein, 78 aa, Glycine max
  Clone ID: PAT_MRT3847_92845C.1.pep
ELANPFSPRVGAFFFSGGYAGFPFGERAVSPRQQMWVCSPLGLPGLSILRVGLLAGAGLELPGFFTRAACWCLDSPGC

SEQ ID NO: 277766 - protein, 108 aa, Glycine max
  unsure (1)..(108): unsure at all Xaa locations
  Clone ID: PAT_MRT3847_92846C.1.pep
LAAELRIPVKGAPVFAFSDPGHXLGGSKGVQGIPPEVSPRMGPGSPPGLGVHLGLVKPKYSVVPPPGTGALFFRFGERFLSANSCRPFFVPWGFFSLAEKFFSGEGGF

SEQ ID NO: 277767 - protein, 45 aa, Glycine max
  Clone ID: PAT_MRT3847_92847C.1.pep
NLTHHKTQGSCVVHPKENGQAFNMERRTRRKDIYTHKKIQINSNT

SEQ ID NO: 277768 - protein, 41 aa, Glycine max
  Clone ID: PAT_MRT3847_92848C.1.pep
NVESDVMSRVDRRSRTPTRFHILVPVLVVEHHPLLSSSAAV

SEQ ID NO: 277769 - protein, 76 aa, Glycine max
  Clone ID: PAT_MRT3847_92849C.1.pep
MASAALSVAKPGLQANGKGFSEFSGLRSSSGFLPFSSHSSQDFHSGGGFHTYAAGSCGGFKMGVTDANLKVALLRL

SEQ ID NO: 277770 - protein, 48 aa, Glycine max
  Clone ID: PAT_MRT3847_9284C.1.pep
GAFRFVQSHALFDPDSRAPLNEYNFYLGATVHKGYPSFFLNLLSMESN

SEQ ID NO: 277771 - protein, 129 aa, Glycine max
  Clone ID: PAT_MRT3847_92850C.1.pep
MKSSNVVMSPTSKVKQALGLKMLKRSPSRRMVSGGSGGPSSPVGGSSPFHQSGSPLRPRRPMTSAEIMRQQMRVTEHSDNLLRKTIMRTLVGQAGRRAETIILPLELLRHVKPSEFSDSNEYHMWQKRQ

SEQ ID NO: 277772 - protein, 74 aa, Glycine max
  Clone ID: PAT_MRT3847_92851C.1.pep
KTKGTGKKRVVVLKGLKKNWGGSPLKKGPPPPEKKSGQGGKNPGGGKGKHPGGNGPGDPKGNQGGGEKLYPQGV

SEQ ID NO: 277773 - protein, 150 aa, Glycine max
  Clone ID: PAT_MRT3847_92852C.1.pep
ASKMGSTYKRCTAGYFIAIADGADDTSKTEAFPQKVERVGVMKEKEAMNYAQEEAPAAWASQGRPATTVLGDGRAYLDAKVDDSSKATLAGDFDIADEVTTMNKKGAYGLERGVQVLGFRAPILKRFHSMHGWMQRAAARTPLDLQSSKE

SEQ ID NO: 277774 - protein, 54 aa, Glycine max
  Clone ID: PAT_MRT3847_92853C.1.pep
KKCRSHAFQLPLQNKIKGSESCSCPRVYNATNNELLKLTLRAPLCFFIHNQLSY

SEQ ID NO: 277775 - protein, 55 aa, Glycine max
  Clone ID: PAT_MRT3847_92854C.1.pep
EEKCKSSCRILPLPPQGAQPGDEAYFRITSARSGRRRMTLSVFWLKGLVQSEDQK

SEQ ID NO: 277776 - protein, 41 aa, Glycine max
  Clone ID: PAT_MRT3847_92855C.1.pep
LGSSAAGTGSAVSFSDDQYAMRLCSSQPLRRCRKRVSRASQ

SEQ ID NO: 277777 - protein, 42 aa, Glycine max
  unsure (1)..(42): unsure at all Xaa locations
  Clone ID: PAT_MRT3847_92856C.1.pep
CSCCRPYVVGGLILLAYCLVFGCDPRKDVKISXLHTMHRRDP

SEQ ID NO: 277778 - protein, 34 aa, Glycine max
  Clone ID: PAT_MRT3847_92857C.1.pep
FFFFFFFFFFFFFFFFFFFFFFFFFWGKKKKGGP

SEQ ID NO: 277779 - protein, 69 aa, Glycine max
  unsure (1)..(69): unsure at all Xaa locations
  Clone ID: PAT_MRT3847_92858C.1.pep
RFLPEFGKGKKMVFLTGVNPFPEVXLLVFFAVKNEILGSTPTNPMLPQLLGNCRSLKYLVDKCPFAIGT

SEQ ID NO: 277780 - protein, 38 aa, Glycine max
  unsure (1)..(38): unsure at all Xaa locations
  Clone ID: PAT_MRT3847_92859C.1.pep
MRSLRISEWPSVCFRVCVRDYLNKGWGXRTRAVGPAFP

SEQ ID NO: 277781 - protein, 128 aa, Glycine max
  Clone ID: PAT_MRT3847_9285C.1.pep
KAKNGKSGNAAAKRSEWAPRDQVFLPTSPSPEHFEAGKWPKPEPHSWELIFPKEVCGPNNGFEKWSSEWANQTSWHLSFLIDNPKQSPVFDILLGISQDFEIAGNTLMPAFSVPQATARSSENAESSA

SEQ ID NO: 277782 - protein, 289 aa, Glycine max
  unsure (1)..(289): unsure at all Xaa locations
  Clone ID: PAT_MRT3847_92860C.1.pep
GNLELAAASLGNTGIQVFAYGLMVQYYSPCFSXISLLQRSTVLLTLAGIILTIIYIFSEPILIFLGESPRIASAAALFVYGLIPQIFAYAVNFPIQKFLQAQSIVAPSAYISTATLLVHLVLSYFVVYEVGLGLLGASLVLSVSWWIIVIAQFVYIVKSEKCKHTWRGFSFQAFSGLPEFFKLSAASAVMLCLETWYFQILVLLAGLLPHPELALDSLSICTTVSGXWVFYDLSLDLTQLQVWRVSNELGARNPKSASFSVVGVTIDFFIISVIVALWGAGNKKMSLAM

SEQ ID NO: 277783 - protein, 94 aa, Glycine max
  unsure (1)..(94): unsure at all Xaa locations
  Clone ID: PAT_MRT3847_92861C.1.pep
AMXQXTTLXXDLXXXXAXLXPXRLXXXTXXYSMXXXLIXXLSPXXXIIXTXQXXXXXDQXXAXXXXXTHXXXIXQQKXIXXXXFRXXHLYXLVH

SEQ ID NO: 277784 - protein, 121 aa, Glycine max
  unsure (1)..(121): unsure at all Xaa locations
  Clone ID: PAT_MRT3847_92862C.1.pep
MALRGLEMSLSVLCTLGRARESHAMDENCXGAVGACAPIRSSLRDLLKXPGPARVEICDHPMHIEETQYPTTFFYKEDLHPGLTMKVQLRKPSFQPPWGAGPWFTEMKDTTKEGCRSGELC

SEQ ID NO: 277785 - protein, 163 aa, Glycine max
  Clone ID: PAT_MRT3847_92863C.1.pep
MSAPMIIDPMVISAPETQSAAAAASILVAQSEVEFAVCDCCGLTEECTPAYIERIREWYFGKWVCGLCAEAVKDEIVRSERLVSTEEAMAKHMNFCKKFKASSGPPPNPTVHLISAMRQILRRTLDSPRVRSTPNSPTKTITKIHVSVLTRSESCFPTLSEGL

SEQ ID NO: 277786 - protein, 99 aa, Glycine max
  unsure (1)..(99): unsure at all Xaa locations
  Clone ID: PAT_MRT3847_92864C.1.pep
FXXXXWVXXXFXXXXXCGXXVXVXXXXVLWCWXXGXXVXCGXXCWGXCXVWWCGCXGXXXVXXVXXXVWXXVXXWXVXXCXWFXXXXXXXXXXXXXVXX

SEQ ID NO: 277787 - protein, 160 aa, Glycine max
  Clone ID: PAT_MRT3847_92865C.1.pep
MSAPMIIDPMMISAPETQSAAASILVAQSEVEFAVCDCCGLTEECTPAYIERIRERYFGKWVCGLCAEAVKDEIVRSERLVCTEEAMAKHMNFCKKFKASGPPPNPTVHLISAMRQILRRTLDSPRVRSTPNSPTKTLTKIHGSVLTRSESCFPTLSEGL

SEQ ID NO: 277788 - protein, 117 aa, Glycine max
  Clone ID: PAT_MRT3847_92866C.1.pep
MTGWLAMSAPMIIDPMMISAPETQSAAASILVAQSEVEFAVCDCCGLTEECTPAYIERIRERYFGKWVCGLCAEAVKDEIVRSERLVCTEQAMAYHMNFCKKFKALGPPPNPTGHLI

SEQ ID NO: 277789 - protein, 72 aa, Glycine max
  Clone ID: PAT_MRT3847_92867C.1.pep
PRLRSLMRERKTHETTHRERLRKGSSRLQTRTGPVIALNVAASTINLKVVMIITTKHTFKVHERASEQPAMV

SEQ ID NO: 277790 - protein, 62 aa, Glycine max
  Clone ID: PAT_MRT3847_92868C.1.pep
QQYILPKQILFLLDPMGPDFDQFFFFLISKINVLYIYIYKIETVPEVPIQKGYTVLISRHQR

SEQ ID NO: 277791 - protein, 36 aa, Glycine max
  Clone ID: PAT_MRT3847_92869C.1.pep
MAMGLQEHLKRLNAPKHRMLVLLGGAFALKPSSGPH

SEQ ID NO: 277792 - protein, 147 aa, Glycine max
  Clone ID: PAT_MRT3847_9286C.1.pep
RAPALNIVPPSPGAAKAVALVLPPLKGKLNGLAPRGPPPNVSVVGLVVRVSKKPFSEKVNSAFREGAAHGLQGILFGCDEPLGSVAFRGPDGSPPVGSPLPLVMGDAMGKVLAWFANEWGSSPRGVGLAALVAPQWEWGPPQFSLGI

SEQ ID NO: 277793 - protein, 51 aa, Glycine max
  Clone ID: PAT_MRT3847_92870C.1.pep
FKITSAMRICAGSLFSMFYSTSCPFQVPSVATNLLPTCPFLTFCHPPPPPQ

SEQ ID NO: 277794 - protein, 60 aa, Glycine max
  Clone ID: PAT_MRT3847_92871C.1.pep
ILRGGSTGDVGHKKRGFLFGAPGFSFKGSLFFGQSLKFPPSSRQCCSPHWVFYPRGQNSF

SEQ ID NO: 277795 - protein, 297 aa, Glycine max
  unsure (1)..(297): unsure at all Xaa locations
  Clone ID: PAT_MRT3847_92872C.1.pep
QQLLKVKPSSQIKKIRAEAELDPKLTALRNLFSKPGVNIDAYVIPSQDAHQSEFIAECYSRRAYISFFXGSAGTAVVTKDKAALWTDGRYFLQAEKQLSSNWILMRAGNPGVPTASEWLNDVLAPGGRVGIDPFLFTSDAAEELKGVISKNNHELVYLYNSNLVDEIWKESRPKPPNNPVRVHNLKYAGLDVASKLSSLRSELVNAGSSAIVISMLDEIAWLLNLRGSDIPHSPVVYAYLIVEVSGAKLFIDDSKVTEEVSDHLKKADTEIRPYNSVISEIERLAARGASLWLDTSS

SEQ ID NO: 277796 - protein, 125 aa, Glycine max
  unsure (1)..(125): unsure at all Xaa locations
  Clone ID: PAT_MRT3847_92873C.1.pep
MEPKLPTPTLEDVETTMGTMLHLTISTARLALAAITVRRTILRXDLLEDSLTHGNYLAGXHLTITHGMKRLIHKHGTIGIPENTCIALAXAMNNCLMERSSSDLXTICSQDCELSTPACTQAHDY

SEQ ID NO: 277797 - protein, 102 aa, Glycine max
  unsure (1)..(102): unsure at all Xaa locations
  Clone ID: PAT_MRT3847_92874C.1.pep
MCGIIHKIGGTLHFGRAKKXNSKGXHHGEHKGLLQGKHHGEYKGGHLGEQRHWEHKEGLVDKIKDKIHGDGHDKGEKKMKNDNKKNDHGHDHYGHSISRDSD

SEQ ID NO: 277798 - protein, 47 aa, Glycine max
  Clone ID: PAT_MRT3847_92875C.1.pep
CLDMNYYALYFCVQFLKFIYKIVKGEINKKIEFQITWTIYYFVFTLW

SEQ ID NO: 277799 - protein, 121 aa, Glycine max
  Clone ID: PAT_MRT3847_92876C.1.pep
FFFFFFSFFFFFFFFFFFFFSFFFKRTQIYQNWKRKREIINPKKKPRAQFLRFGLGQQPNTTQPKGNNKTKIQGKQTNPRPQKTIYRIPTPRRNKGTPTKLPAPGGVGLPPKEHPQDPCSP

SEQ ID NO: 277800 - protein, 48 aa, Glycine max
  unsure (1)..(48): unsure at all Xaa locations
  Clone ID: PAT_MRT3847_92877C.1.pep
SNINKFPKEMLFVKGIRXPFCVNAPTPQYSFPSHLGIHIKQNKIIWIN

SEQ ID NO: 277801 - protein, 81 aa, Glycine max
  unsure (1)..(81): unsure at all Xaa locations
  Clone ID: PAT_MRT3847_92878C.1.pep
FXGXRLXXQFGFXKIGIXYXVSGXGXSXXSXXFIRDHISVXASGALXGLLGAMLSELITNWTIYSXKXMALIXLLXIXXIX

SEQ ID NO: 277802 - protein, 131 aa, Glycine max
  Clone ID: PAT_MRT3847_92879C.1.pep
WAPRFFIRPFRFSFWVCLLGCWVFWQENIFSPQAAPFSATPPWDTPSPYRDRLGVPGWPSRFRFCPPASAFALATSPPLVGLTPWLVAVLCAFFMVGFFFLGPGLLVGGIVFFFFFFFRLFSFPFGLSSLQ

SEQ ID NO: 277803 - protein, 152 aa, Glycine max
  unsure (1)..(152): unsure at all Xaa locations
  Clone ID: PAT_MRT3847_9287C.1.pep
IXVTGWTATPMQDAQATIDWFISSQECVPRTYCGLNPQNPFVLNRWMGKLTFPQGTSRSVKRMPLSIGGGAGAKNAILMNMPKAVLSMWRYFVGDLAFEASKKTTPHIKWTGPFFIALGNLAEDTTNVEDFPHKLVEIGEIPGKGGLKISEE

SEQ ID NO: 277804 - protein, 64 aa, Glycine max
  Clone ID: PAT_MRT3847_92880C.1.pep
AFQSPHPGGQHLEAGGKGSGHLGGPQKEGPPMVFPTQIKKRFGKPLNDFFSPYLTRGDPEGQEG

SEQ ID NO: 277805 - protein, 430 aa, Glycine max
  unsure (1)..(430): unsure at all Xaa locations
  Clone ID: PAT_MRT3847_92881C.1.pep
WQVPGLLLTSLFAGNSRGRPTRPGQVAQNIIFHLVSGKTEEQQEWNYRPLPASAPPISKKQGFRSLKLVNADMDQLLSDQPVGVDYGTLDNGLRYYVRCNSKPRMRAALALAVWAGSVLEEEDERGVAHIVEHLAFSATKKYTNHDIIKFLESIGAEFGACQNAVTSADDTVYELLVPVDKPELLSQAISVLAEFSSEIRVSKDDLEKERGAVMEEYRGSRNATGRLQDAHWMLMMEGSKYAERLPIGLERVIRTVSSETVKHFYKKWYHLCNMAVIAVGDFSDAQDVVELIKTHFGQKIPDPDPPLIPTIQVPSHDEPRFSCFVESEAAGXAVMISYKMPADELKTVKDYRNXLQNPMFLYALXNQRFFKIARRNDPPYFYCSTAADVLVARARLHGFSEREISVVRALLMTEIESAYLERDQIQSTSL

SEQ ID NO: 277806 - protein, 69 aa, Glycine max
  unsure (1)..(69): unsure at all Xaa locations
  Clone ID: PAT_MRT3847_92882C.1.pep
GPGGQPGNPGPDPGGEPXFPKRGGKKSGGKKGKKGFPGENGNPLKIPKKKKPEKKKGKAGGAKGGTKPK

SEQ ID NO: 277807 - protein, 63 aa, Glycine max
  Clone ID: PAT_MRT3847_92883C.1.pep
MMWGLWKLGQSIPRRLAHGNNKAVACRYFASDAELKKTVLHDFHVANGGKMVPFAGWSMPIQY

SEQ ID NO: 277808 - protein, 77 aa, Glycine max
  Clone ID: PAT_MRT3847_92884C.1.pep
ASTAARRRQKGSLMAPYLPQGGTGACGRAYCKKWCSLCPWAYSCVTMGRASNNFFLIARAVPLVGVINNGGCLRLWF

SEQ ID NO: 277809 - protein, 45 aa, Glycine max
  Clone ID: PAT_MRT3847_92885C.1.pep
KIYKGSEQSFLRTKRFITLPPTFFCVLFLRKGRGTNYNLYKFSTT

SEQ ID NO: 277810 - protein, 113 aa, Glycine max
  unsure (1)..(113): unsure at all Xaa locations
  Clone ID: PAT_MRT3847_92886C.1.pep
ETAQETFVFTSESVNEGHPDXLCDQIYDASLDACLEHDPNSKVACATCTMTNLGMDFGETTTKATVDYDKIVRNTCREIGFISDDAGLDADKCKERVNIEQQSPYIAHSVHGH

SEQ ID NO: 277811 - protein, 448 aa, Glycine max
  unsure (1)..(448): unsure at all Xaa locations
  Clone ID: PAT_MRT3847_92887C.1.pep
SHACAHASVAGAIRRQKGTAARRPQKGTAARRLQKGLYISHFEAVENVVRLHKAGSDANLEDLSSVISSNGHSIEEFLASEATEAGSIFDDLQRTLSTQQDELELFARKLRNRFNLSLEQIKDISDRSQEFVDKLFEESKKLEDYASQADQMQMKSIDEFKKAYEEQSKSDTEKLIANMTSLVSDHIRRQMDLCNSKLVDLRESGIKNKSFLDGHVSSMEDIVTNAKRKWQAFCVQAEKDAKDTADDSAAKHCRMEKLIQRGVHTAQSAFEHTKKTHEAVNEMGTKHISATESIVRNATDNNVQHVVEVHSARVTAEEDVAKNSEDLLEQLDVTSAQERESISGVLNVVRTHANTLETLREDHNGQATSIEHXTSKTFQQQYRDYEASGTTPIRCEPDVPTKGTIESLRSLPMEAPLEEFRENNPYESNDVKELKPSLIPRSPLTQLN

SEQ ID NO: 277812 - protein, 82 aa, Glycine max
  Clone ID: PAT_MRT3847_92888C.1.pep
REKMIDGHRRQKMIEGHGPQNLIEGHGRQKMIEGYGRQKIIEGHGRDKMIEGHRRKKMLERHSREKIIEGHTRQTIIDTHGR

SEQ ID NO: 277813 - protein, 75 aa, Glycine max
  Clone ID: PAT_MRT3847_92889C.1.pep
IKLSINYYHILSFFQLYVACIRSIISLRDYPSKHFIINNILKQAIPICKGKAILIDYRHCFGVLRQLISIAFGSL

SEQ ID NO: 277814 - protein, 52 aa, Glycine max
  unsure (1)..(52): unsure at all Xaa locations
  Clone ID: PAT_MRT3847_9288C.1.pep
MRISENKRVTLRRVIPKSTHEVLYQIGEXGSTNPRFHQLELEIKHRTEKETE

SEQ ID NO: 277815 - protein, 102 aa, Glycine max
  unsure (1)..(102): unsure at all Xaa locations
  Clone ID: PAT_MRT3847_92890C.1.pep
LARNSXXVXXXFSFXXXXXXXLLKXNXXXXXXFFXLSXXFIXMXIXKXIXXXXGXXXXXGXXXIXXXXXXXXILXXXXXXXXXXAXXXXXXXFXXXXXXXXX

SEQ ID NO: 277816 - protein, 56 aa, Glycine max
  Clone ID: PAT_MRT3847_92891C.1.pep
DRISISHRFQYMTIKSPSFSFFYHKGSWWRYRVVLGIIPGLWSSFLTNPPPFVCFC

SEQ ID NO: 277817 - protein, 47 aa, Glycine max
  unsure (1)..(47): unsure at all Xaa locations
  Clone ID: PAT_MRT3847_92892C.1.pep
GRPLHELXXLQXACKLSXRHYTFNSTXSVKLISSSSXEXDHKHATLX

SEQ ID NO: 277818 - protein, 76 aa, Glycine max
  Clone ID: PAT_MRT3847_92893C.1.pep
MQQGGGSETEVTWEDQQNINKFGRLNNRFHELEDEIKIAKVFYSTLSFHSCLVYYAHRTLGHAQIIFTSCLVIYYS

SEQ ID NO: 277819 - protein, 1013 aa, Glycine max
  unsure (1)..(1013): unsure at all Xaa locations
  Clone ID: PAT_MRT3847_92894C.1.pep
MPKMRVLFVFLFFHFHFPETLSAPISEYRALLSLRSVITDATPPVLSSWNASIPYCSWLGVTCDNRRHVTALNLTGLDLSGTLSADVAHLPFLSNLSLAANKFSGPIPPSLSALSGLRFLNLSNNVFNETFPSELWRLQSLEVLDLYNNNMTGVLPLAVAQMQNLRHLHLGGNFFSGQIPPEYGRWQRLQYLAVSGNELDGTIPPELGNLSALRELYIGYYNTYSGGIPPEIGNLSNLVRLDAAYCGLSGEIPAELGKLQNLDTLFLQVNALSGSLTPELGSLKSLKSMDLSNNMLSGEVPASFAELKNLTLLNLFRNKLHGAIPEFVGELPALEVLQLWENNFTGSIPQSLGKNGRLTLVDLSSNKITGTLPPYMCYGNRLQTLITLGNYLFGPIPESLGSCESLTRIRMGENFLNGSIPRGLFGLPKLTQVELQDNYLSGEFPEVGSVAVNLGQITLSNNQLSGALPPSIGNFSSVQKLLLDGNMFTGRIPTQIGRLQQLSKIDFSGNKFSGPIAPEISQCKLLTFLDLSRNELSGDIPNEITGMRILNYLNLSKNHLVGSIPSSISSMQSLTSVDFSYNNLSGLVPGTGQFSYFNYTSFLGNPDLCGPYLGACKGGVANGAHQPHVKGLSSSLKLLLVVGLLLCSIAFAVAAIFKARSLKKASEARAWKLTAFQRLDFTVDDVLHCLKEDNIIGKGGAGIVYKGAMPNGDHVAVKRLPAMSRGSSHDHGFNAEIQTLGRIRHRXHIVRLLGFCSNHETNLLVYEYMPNGSLGEVLHGKKGGHLHWDTRYKIAVEAAKGLCYLHHDCSPLIVHRDVKSNNILLDSNHEAHVADFGLAKFLQDSGTSECMSAIAGSYGYIAPEYAYTLKVDEKSDVYSFGVVLLELITGRKPVGEFGDGVDIVQWVRKMTDSNKEGVLKVLDPRLPSVPLHEVMHVFYVAMLCVEEQAVERPTMREVVQILTELPKPPGSKEGDLTITESSLSSSNALESPSSASKEDQNPPQSPPPDLLSI

SEQ ID NO: 277820 - protein, 68 aa, Glycine max
  unsure (1)..(68): unsure at all Xaa locations
  Clone ID: PAT_MRT3847_92895C.1.pep
KGAGAGRKQSKKAAXDPNKPXRPPSAFFAFIFCDLFFKSEFTEQFKNEHPNYISVAVVSDFTLLSLVD

SEQ ID NO: 277821 - protein, 60 aa, Glycine max
  Clone ID: PAT_MRT3847_92896C.1.pep
MIDPYWGGRTLLCRRNLIMISDDEQHLHLLSTLITLFQPLYIFLLYENVHTKRDSAVDAP

SEQ ID NO: 277822 - protein, 79 aa, Glycine max
  Clone ID: PAT_MRT3847_92897C.1.pep
FTFNTSHGHRKPPLLIKLTFMLVQGLSNTLTTPYRKHTDGHFVRTRLPLRNAFLFYRSDSDRSDRTLDSSIEIARRCSV

SEQ ID NO: 277823 - protein, 51 aa, Glycine max
  unsure (1)..(51): unsure at all Xaa locations
  Clone ID: PAT_MRT3847_92898C.1.pep
KXRGGPRVRPPTXHXXXPYISYILSSLISPLFYTNFPLINLYKYQKSPFLF

SEQ ID NO: 277824 - protein, 100 aa, Glycine max
  unsure (1)..(100): unsure at all Xaa locations
  Clone ID: PAT_MRT3847_92899C.1.pep
HHHCHPTVIHKNIKSSNILLDTNFNAXLANFNLTLTRXSQSKNNMKLSSTLKYIAPEYLLDNKXSYKSDIYTFKIILLKLLLEKKPVEKLIPAQYQSIIT

SEQ ID NO: 277825 - protein, 573 aa, Glycine max
  Clone ID: PAT_MRT3847_9289C.1.pep
MFPRWSPDAIVFNSNQVYETPSYRVQFMFRESNGATFLKSQLQTPDPDSVDASAILWKNLQDKKTYLKINFAGDVLSVCYCNLTICLSIIATSFGQSQLQPLFPFMEALPDEMHVAVPFLLSFIMGDPVKMASVSIENKLPPAKKIEQLSYNLTALLPCLPELADIIPRDTLLWKLKLLKSAAAYANSRIHAVEAEVLVLASGKDNMLPSTNEAQRLVGLLQNCKVRVFKDSGHTLLLEDGIGLLTIIKGTCMYRRSRRHDLVRDFIPPSMTEFRYAMDQVVGSFRSATGSVFFSTLEDGKIVKGLSGVPDEGPVLYVGYHMLLGLELISLTDGFLSEKGIALRGIAHPDLFRPEVESWSSEFSMFDWVKIFGGVPVSASNIFKLLSTKSHVLLYPGGAREALHYKGEEYKLIWPDHPEFVRMAARFGATIVPFGAVGEDDIAELVLDYNDLMKIPIVNDHIRNMNRDSVKFRDETSGEVANQNLSFPVLLPKIPGRFYFLFGKPIRTKGMDKMLKDRESANQMYLEIKSEVEHNLNYLIKKREEDPYRNFVDRKMYQIFYPPETDSTPSFKP

SEQ ID NO: 277826 - protein, 46 aa, Glycine max
  Clone ID: PAT_MRT3847_928C.1.pep
LFSVCSFGKMVACFRYASIHLHSVYLPPPKLEFNYDSQDWLQKDAN

SEQ ID NO: 277827 - protein, 114 aa, Glycine max
  Clone ID: PAT_MRT3847_92900C.1.pep
ETLSEGGEDETPLQVKLNGVATVIGKIGLTFSVLTFVVLTIRFVVEKAVRGEFASWSSNDALKLLDYFAIAVTIIVVAIPEGLPSAVTLSLAFAMKKLMKDKALVRHLSACETM

SEQ ID NO: 277828 - protein, 72 aa, Glycine max
  Clone ID: PAT_MRT3847_92901C.1.pep
TPNPQTINLSRMKLDVPRFDGSDPSGWMFKITQFFEYHATLESDRLTIAYFYMEGPPLAWFRWMMRNHQLTT

SEQ ID NO: 277829 - protein, 47 aa, Glycine max
  Clone ID: PAT_MRT3847_92902C.1.pep
SGRFVFFFCFFFFGKKQIVDTKTSFKVSTRSCYSPNVIPKNILINDP

SEQ ID NO: 277830 - protein, 61 aa, Glycine max
  Clone ID: PAT_MRT3847_92903C.1.pep
WGVLIPPHIEDAYSPLPRWMGESLKGGKYFESYHFSWAEGKRTIELVARKENAIAQVVIHI

SEQ ID NO: 277831 - protein, 84 aa, Glycine max
  unsure (1)..(84): unsure at all Xaa locations
  Clone ID: PAT_MRT3847_92904C.1.pep
QLKLKALAFHTXXDXKTXXSMAXSVSTVGXVXRXLLXLNGSGVEXQXPVQLLWXXVEEXXWXKGPQKEGSXGKLSKLVVXKRRK

SEQ ID NO: 277832 - protein, 78 aa, Glycine max
  Clone ID: PAT_MRT3847_92905C.1.pep
ILLKQFGKKRKNFSIPQRKKIDFRMVWANFFWPRTKGGKNSNFWVSGKNPFSTPPVFYFKKFFDFKKISLKPISQKDF

SEQ ID NO: 277833 - protein, 56 aa, Glycine max
  Clone ID: PAT_MRT3847_92906C.1.pep
VSGIQASCDKPKLLAQLSALLSEVGLNIREAHVFSTTDGFCLDVFVVAGWASNANF

SEQ ID NO: 277834 - protein, 416 aa, Glycine max
  Clone ID: PAT_MRT3847_92907C.1.pep
MTCTHAALKRKDFLQLGFKYDNLLMEESAQILEIETFIPMLLQRQEDGHARLKRCILIGDHHQLPPVVKNMAFQKYSHMDQSLFTRFVRLGIPYIELNAQGRARPSIAKLYNWRYRDLGDLPSVKEEVVFNRANAGFAYDYQLVDVPDYLGKGETTPSPWFYQNEGEAEYVVSVYIYMRLLGYPANKISILTTYNGQKLLIRDVVNRRCVPYDFIGPPSKVTTVDKFQGQQNDFILLSLVRTRFVGHLRDVRRLVVAMSRARLGLYVFCRRSLFEQCYELQPTFQLLLKRPDHLALNVNEITSYTERNVEDPGPGHHLHLVSGIEEMGSIIDRLYQEKLRHQFDQNGAYFSHLEPSANTDWVQSGQQTMDTDMPEQTEEATTVDNHVAVDMPPENSMEDVTMVDNGDGVANGNPSP

SEQ ID NO: 277835 - protein, 452 aa, Glycine max
  Clone ID: PAT_MRT3847_92908C.1.pep
MPVAKLPASGTIDFRKTDDGSDSLDTIIRQAIGKEPLLSFPRAGVSPVQWIQLLNALDQQGLPLLSPVKVHLQKCNKCSREFCSPINYRRHIRIQHRLKKLDKDSDKNRDLLGAYWDKLSVEEAKEVVSFKNVMLEEVPGSSILEALTTLRKQGFSSLPQYYLRAGTALLNIVQSRPSSFPISSQELFSILDDSSEKTFLVGSAVSMQRYVFDGEAGKIGLEPKNLVACTSFLLEQKLVKAWLADKDAEALRCQKLLVEEEEAAQKRKAEILERKRQKKLRQKEHKARERLEDDTEIKENISSTGEDVLPAEASSGTCDFEAQNPDIFADHSTPPHVTSRCLDNDEVVEGVTLSGYDFDTDQYIERQTSRGHNHRRIMATRWQGLPKSQWAIANGSHPGHNSQMSKLGVIQKHGTNCDQRVAPIVNGSKFWSRKPKPETNGVVLTAIHKGIW

SEQ ID NO: 277836 - protein, 64 aa, Glycine max
  Clone ID: PAT_MRT3847_92909C.1.pep
SPSILRYHHQFCFISSIFISLFFNFFLKILSLPVNFMWGGTFMTYYEGRKTSSTEQKKWGFGDN

SEQ ID NO: 277837 - protein, 137 aa, Glycine max
  unsure (1)..(137): unsure at all Xaa locations
  Clone ID: PAT_MRT3847_9290C.1.pep
RGKPADGRAKLAQEYEKHAAHESLKDQIPAVDKYXTTKVNNVAKIMNLTQSVDGDLKLLTDGKLYEGKHIPVSNISAGENHVVQIPLMAQEEILSSSASDIRTAQVSKNSKPXATAKHEGAIEIIIESFPSPDCNIE

SEQ ID NO: 277838 - protein, 66 aa, Glycine max
  Clone ID: PAT_MRT3847_92910C.1.pep
KYIFFPQFQSVECINAAKKGIGIRIRVALHSHNRRILLTSTTRSVETRIKVLKKKKKNPKGGRSRG

SEQ ID NO: 277839 - protein, 77 aa, Glycine max
  Clone ID: PAT_MRT3847_92911C.1.pep
KKWGALPMYTKFLFQNYKSLGIRKTPLNLMPKFFFSKLLWGGHYIFGPTIFQLKWQRKGLKHLGGIHPTPPLEKIFF

SEQ ID NO: 277840 - protein, 386 aa, Glycine max
  Clone ID: PAT_MRT3847_92912C.1.pep
MKQAAALGGVQRARKRFVGVRQRPSGRWVAEIKDTIQKIRVWLGTFDTAEEAARAYDEAACLLRGTNTRTNFWPCSQSSTSPALSSKITNLLLQRLKERNNNNTCSSSSSSSTSLLINHQQMHQQVGAYGEGSTQFSIDQFTDFLNDPEDYSTSNNDFINNSAQIDYITSSFESCLTEKDGGTKIDMQYKSRNVTPQTSSNDSNSGVEDSEEEGSDLGVQSTNLDVHDFKFLDNIAPPSYYSPFEMAEEMEEEPVEPENENYGDEPSMLRAVMKRMTYERKFSASLYAFNGIPECLKLKLESGNMKGRGLADQLTSLQMACSKNILEKNKEEKEYIGTMDRRQEEEHQQTSPDMDSSSVDGELLLWNSLDLPPICFVNLLENGSFN

SEQ ID NO: 277841 - protein, 79 aa, Glycine max
  Clone ID: PAT_MRT3847_92913C.1.pep
QVWKGQGSRKWKHAQSDGFFVQFESPSLRKLWFIPSSNEKGQTWCRFLSHFYSQHLFTEYKFCSLWRVILRGLIVLLSK

SEQ ID NO: 277842 - protein, 324 aa, Glycine max
  Clone ID: PAT_MRT3847_92914C.1.pep
MAETKEGSGSEMSLKDQGNEFFKSGKYLKAAALYTQAIKLDPSNPTLYSNRAAALLQLDKLNKALDDAEMTIKLKPQWEKGYFRKGSILEAMKRYDDALASFQIALQYNPQSQEVSKKIKKINQLVKDSKRAQEVENMRSNVDMAKHLDTFKTEMSGKYGSEECLKDLFSFLVETMETAVKSWHETFSVDAKVYFLLDKEKTDTDKYAPVVNIDKAFESPHTHGNCFAFLRQYAEESFSKAACLVTPKNIIAYPQVWKGQGSRKWKHAQSDGFFVQFESPSLRKLWFIPSSNEKGQTWCRDPEVLDIGAHEVLPRLFKEKQPRS

SEQ ID NO: 277843 - protein, 51 aa, Glycine max
  Clone ID: PAT_MRT3847_92915C.1.pep
HSANCRGKESSVGPVLPSVLVMPLSPPYFLFLEYSYSLWAVDMYRKSNFVS

SEQ ID NO: 277844 - protein, 166 aa, Glycine max
  Clone ID: PAT_MRT3847_92916C.1.pep
MFLSNKHVDVTFLLFLFMFEIGSSSAAPVYNANYCPNNTSYNSNVTFQTNLRVLLASLVSNVSQSDGSYNSAMGMGTTSVASGQFLCRGDVSPATCQDCIASAATEITRLCPNKTESIIWYDECTLRFTNRYFAPTSIDPGARLSDDNNISASDLDSFNQTLFGLL

SEQ ID NO: 277845 - protein, 118 aa, Glycine max
  Clone ID: PAT_MRT3847_92917C.1.pep
FSSRNHETNSLFLFSIGLMEFPCLGCYSNVPLSLSLLVLKLGLTMPSFFLIRLKLIVKNERGFWFCACDVNHFPSPSSHLYLDMCFYLSIFWLCRYMLTYGLDSVTCFTKHDLCSRPY

SEQ ID NO: 277846 - protein, 51 aa, Glycine max
  Clone ID: PAT_MRT3847_92918C.1.pep
STCTLVEDDSGTNTTSRVDTSAGDRDGAVIIFNKDLGWDDHWILWVGPFIG

SEQ ID NO: 277847 - protein, 47 aa, Glycine max
  Clone ID: PAT_MRT3847_92919C.1.pep
NTAKFKQFCHRLLRTQYWEHQARDDGEDFKLLSKDMLPMSEDTRVQK

SEQ ID NO: 277848 - protein, 67 aa, Glycine max
  Clone ID: PAT_MRT3847_9291C.1.pep
EKKIFLFKKDPPSHLNPFLCLTLSNQNLLNGYCCVAYGCCPATLNQIPSRRSLSLFFIFRTRGRTRG

SEQ ID NO: 277849 - protein, 66 aa, Glycine max
  unsure (1)..(66): unsure at all Xaa locations
  Clone ID: PAT_MRT3847_92920C.1.pep
KHCHHGYCDHLNILPFTFDTCQQIFSFXHRSYKFHTSLISDHTTTKLFTLKACLIYIYTTVHVLLN

SEQ ID NO: 277850 - protein, 72 aa, Glycine max
  Clone ID: PAT_MRT3847_92921C.1.pep
SFYETLPCRVTKISDGYNMVMVTVEDGRNFVADAVIVTVPIGILKANLIEFSPKLPHWKAEAIKDIGMGNEN

SEQ ID NO: 277851 - protein, 175 aa, Glycine max
  unsure (1)..(175): unsure at all Xaa locations
  Clone ID: PAT_MRT3847_92922C.1.pep
MENTSNDAGVEALRLLKATEPPSFLTPNPALSEAARTASQYLFSSLKPFSPKSPLDQLLVDGFDAEQIWQQIDLQTQPLLSTIRRRVKQLVENPEEISQLKVPSEGGNKKEEKSQDEWEEESDGFDEELDEEEEEDEDDEVKEGEGEEEEEETEDEEEEGEDNEEGGVIXDKCFK

SEQ ID NO: 277852 - protein, 39 aa, Glycine max
  Clone ID: PAT_MRT3847_92923C.1.pep
LTSILTAVQLWPEQGTPQDLSPSGNIRLLGRLTQTNLTV

SEQ ID NO: 277853 - protein, 90 aa, Glycine max
  Clone ID: PAT_MRT3847_92924C.1.pep
LSVSPPFLALDRIYPPIGAAFPNNPTCRQLLLVRPGPGTTGLLPFFAPPSRGLWPGPPLRTLFQTSIRTPWATDFHGGLFPVRSPVLRES

SEQ ID NO: 277854 - protein, 312 aa, Glycine max
  Clone ID: PAT_MRT3847_92925C.1.pep
MDRCWFNKFKPKDKTQSSKNKETKGIAKEGSKPLTNEEAPSNVTKQKVAAAKQYIENHYKKQMKDLEERQERENKNLTGTARYASVNTHLGVEQSRRDDLESLGYVLMYFLRGSLPWQGLRAGTKKQKYDKISEKKMLTPIEVLCKSYPLEFTSYFHYCRSLRFEDKPDYSYLKRLFRDLFIREGYQFDYVFDWTMLKYPQIGSSSRARPSGKPVINPGQSGERIERPSGAVEAFARRNGSGLFYIVSFLHKSSDVPSCKLILSMERRIICKNAFGCFAPFYAYFIPVYFVPMYISSNGNVNRWLRLWIKKK

SEQ ID NO: 277855 - protein, 47 aa, Glycine max
  unsure (1)..(47): unsure at all Xaa locations
  Clone ID: PAT_MRT3847_92926C.1.pep
MSSTSLRNLPREVYKLKSVKILILSGCSKIDLLEEDIVQMESLTXLI

SEQ ID NO: 277856 - protein, 79 aa, Glycine max
  Clone ID: PAT_MRT3847_92927C.1.pep
KNVTRKNKNLYGSLGLFKGTNFFPTRVFSKFKKKKSMGGFLSFLSKPKEKRTSILLFNRTGEYFSIANPEKIKKTVFFF

SEQ ID NO: 277857 - protein, 45 aa, Glycine max
  Clone ID: PAT_MRT3847_92928C.1.pep
FAAATYQFLPCTSSSPINKMLNTRKRLNKIVHEVITSNPAASSAA

SEQ ID NO: 277858 - protein, 73 aa, Glycine max
  unsure (1)..(73): unsure at all Xaa locations
  Clone ID: PAT_MRT3847_92929C.1.pep
PSKLTLYPLPTNIFQIIFHNQYLSTXTPNFPQINQSYTTYNSSILPPSTYYQNIHLSTSITYISNIIISIXTH

SEQ ID NO: 277859 - protein, 52 aa, Glycine max
  Clone ID: PAT_MRT3847_9292C.1.pep
RGPPRGPPRGPPPGPPPGPIRNSWQGLKKIPKPRTQSWFNNGVQNPWPLLSF

SEQ ID NO: 277860 - protein, 216 aa, Glycine max
  Clone ID: PAT_MRT3847_92930C.1.pep
MLQNSSMSSLLLHRINGGGGATTATNCHDTVFMTVPDGVARYHTHAVAPNQCCSSVAQEIGASVATVWSVLRRFDNPQAYKHFVKSCHVIGGDGDVGTLREVHVISGLPAARSTERLEILDDERHVISFSVVGGDHRLANYRSVTTLHPTASSASGGCSGTVVVESYVVDVPPGNTREDTRVFVDTIVKCNLQSLAQTAENLTLRKNNNNDYKCCS

SEQ ID NO: 277861 - protein, 44 aa, Glycine max
  Clone ID: PAT_MRT3847_92931C.1.pep
DYLQNELQDVGWPQTTTLIAEPLSNLYNSLVLNTTTLAGTNFYL

SEQ ID NO: 277862 - protein, 49 aa, Glycine max
  Clone ID: PAT_MRT3847_92932C.1.pep
CLVVTNYMDERRLFIRGVQKEHSLNAYHAHHVIFSSCLRVYGCYVHLKG

SEQ ID NO: 277863 - protein, 48 aa, Glycine max
  Clone ID: PAT_MRT3847_92933C.1.pep
KNRRITSEKKRRLRAYQVKARENNFEVENKLAPERKVNLAQQLGLQPT

SEQ ID NO: 277864 - protein, 70 aa, Glycine max
  Clone ID: PAT_MRT3847_92934C.1.pep
VCGGYRDYRAAMDLDSAAAFEGYLVLVKIKAAEDMECVNHHSDRMPYMTLPLSDSHTRKQLVESLHVRGI

SEQ ID NO: 277865 - protein, 55 aa, Glycine max
  unsure (1)..(55): unsure at all Xaa locations
  Clone ID: PAT_MRT3847_92935C.1.pep
DISDSREPAIMVWFLKSNKWEMXKINXKSXHTGYQIMYKYTIHGRKKRRLLAAFS

SEQ ID NO: 277866 - protein, 204 aa, Glycine max
  Clone ID: PAT_MRT3847_92936C.1.pep
MGGKTENLSLQGSKQSVSDGGTELKQPKKGTVKLSTEFVTLKTKESTSCSAECDTTADNNGMSVSTKLDSKDVCLNRNDSVVSNEAVSSNSGTSDQQSADLLEATSKQCKDDSAENAGSVSVSLPASGTKDRPISESSKVKPTSKGKKKRKEILQKADAAGSTSDLYNAYKGPEEKKETIISSEKQVVLLLEISCQLILLSQML

SEQ ID NO: 277867 - protein, 54 aa, Glycine max
  Clone ID: PAT_MRT3847_92937C.1.pep
RRTYELRKEAAAATFLVQYPSDANAKTLSIIITTEYMFLSSFCVLTMPVGLLQR

SEQ ID NO: 277868 - protein, 136 aa, Glycine max
  Clone ID: PAT_MRT3847_92938C.1.pep
AVVTSEDLSAAASDMLSATSESITSAVETKTNDSTQVSACASAEGPVTQVADNLNNHKNAEIDELLQQDKPLQPDILEMVRKTENLSLQGSKQSVSDGGTELKQPKQGAAKLSTEVVTLRTVQQGQGQDESTSCSA

SEQ ID NO: 277869 - protein, 54 aa, Glycine max
  Clone ID: PAT_MRT3847_92939C.1.pep
TFHALLPELGIRVEVNITYNLYFTSSVEATSKGGLIEIGEKPQRALPISAMKLL

SEQ ID NO: 277870 - protein, 219 aa, Glycine max
  unsure (1)..(219): unsure at all Xaa locations
  Clone ID: PAT_MRT3847_9293C.1.pep
PRVLFGQSQLQPLFPFMEALPDEMHVAVPFLLSFIMGDPVKMASVSIENKLPPAKKIEQLSYNLTALLPCLPELADIIPRDTLLWKLKLLKSAAAYANSRIHAVEAEVLVLARFYSLETXTPLMIIFGKDNMLPSTNEAQRLVGLLQNCKVRVFKDSGHTLLLEDGIGLLTIIKGTCMYRRSRRHDLVRDFIPPSMTEFRYAMDQVVGSFRSATGSVFF

SEQ ID NO: 277871 - protein, 151 aa, Glycine max
  Clone ID: PAT_MRT3847_92940C.1.pep
LSAAASDTLSATIESLTCAVEMKTNDSTQVSACASAEGPVTQVMDNLNNHKIAELDELSHQDKPLQPNILEMGGKTENLSLQGSKQSVSDGGTELKQPKKGTVKLSTEFVTLKTKESTSCSAECDTTADNNGMSVSTKLDSKDVCLNRNDS

SEQ ID NO: 277872 - protein, 89 aa, Glycine max
  unsure (1)..(89): unsure at all Xaa locations
  Clone ID: PAT_MRT3847_92941C.1.pep
KCSQLHMDLVXQGSMDGTHSLLIFCKPPQGAWXQIQQLVSLAKQHVPAGSKERIKVNVHSCKQLSVVXXVGVRTIXXGVHAPPGGXVTH

SEQ ID NO: 277873 - protein, 77 aa, Glycine max
  Clone ID: PAT_MRT3847_92942C.1.pep
QIIIPVPETFSHYKNLTILSLNNCGLTGTFPHKIFNIGTLSVIDISWNNNLHGFLTEFPSRGSPWESEKKRMVIYAA

SEQ ID NO: 277874 - protein, 74 aa, Glycine max
  unsure (1)..(74): unsure at all Xaa locations
  Clone ID: PAT_MRT3847_92943C.1.pep
NLIAIGVLGIKEREANIELGGFKEQRXRQQXKEQPLEMPKYRSELSEQDIFGIPTGYPVGGNYYPQSWNFFRVS

SEQ ID NO: 277875 - protein, 68 aa, Glycine max
  Clone ID: PAT_MRT3847_92944C.1.pep
NSSSSSFNLFPQQVPQSLSTLPHLHLHNNCKTHLPLLSPNINTLIPHFPNKTPTELQLAITTIDNTPA

SEQ ID NO: 277876 - protein, 194 aa, Glycine max
  Clone ID: PAT_MRT3847_92945C.1.pep
MLLTVEGGGFFSSSASGYTKGLALLLLGQICDDKSMRVLPWNQFHLGQESDHELQLASRKNRVSSGCAYFVCFGRVSAGFDTTSHLKVGPAKHHDVSSGTLVSNKGKYPSANVNDDSRKVALKSCLKRKQNKKPAPVEAATEHEASSGGKRKVQWTDTCGSELVEIREFEPSDADGSVDEFDHGNHKTCSCAIM

SEQ ID NO: 277877 - protein, 133 aa, Glycine max
  Clone ID: PAT_MRT3847_92946C.1.pep
HLLGTGPEPFVAALALVPIVHPIPLPRSHFPGVVAVSVADESAGCRGAELGLVVLCLGLAVARGIFCRAVLFGAWFLGVGEPGAAQYVYWAAGLARLVFRLFLSVVVLRAWGRRSPQGTPLPLGVLGSAWLLC

SEQ ID NO: 277878 - protein, 88 aa, Glycine max
  Clone ID: PAT_MRT3847_92947C.1.pep
FSLRFRLHFIVNKKRMTGDFPGGGSIGGSLPFSKFFHPKKRPLFLKFFGTNCHQIPNGDCLKSRKFKLDPWGMETTFCQPRVWDPKFF

SEQ ID NO: 277879 - protein, 76 aa, Glycine max
  Clone ID: PAT_MRT3847_92948C.1.pep
ENVVRDDCSYWSASMQNINPNRHSTLIEPPNIITTSKPFYIAIPDRAIADTRGQDLNFICVKHQHDIDYDWNMLLP

SEQ ID NO: 277880 - protein, 69 aa, Glycine max
  unsure (1)..(69): unsure at all Xaa locations
  Clone ID: PAT_MRT3847_92949C.1.pep
TISIPHLTAMTPTPSNLXKSSXPNGNQVNSAKKPLFSKGLRITTQISXCXTCLTRXAPXXLXWLNEXQN

SEQ ID NO: 277881 - protein, 115 aa, Glycine max
  Clone ID: PAT_MRT3847_9294C.1.pep
CCPKSKLIKQTFAPTPKCFSITTTLDGNADQLEKKSEIKDFYRKVSPPNPIPDRRVGALIQVFTSLNLKLSRKLRKIQKKFKSVHEVLYQIGECSANELRVVQKMIHEVCGQHRE

SEQ ID NO: 277882 - protein, 53 aa, Glycine max
  Clone ID: PAT_MRT3847_92950C.1.pep
LHFGGGQRTKYSKKSTGSLSMLFDLKITLALRHRPYSLGFFSSNGHICINFPL

SEQ ID NO: 277883 - protein, 296 aa, Glycine max
  Clone ID: PAT_MRT3847_92951C.1.pep
MKKRSSSSSSSSVFEANGVEEPQQPSSCAAAALDELHKEKNENGEETLVPSNPYPNLDDGFYEIETIRRKRLRKGQLQYLIKWRGWPETANTWEPLENLQSVPDLVDAFEDSLKSGKHQKRKRKHVDVLQLTLLKKRSERSTTSYSLRHFPPLTPTNANDYDPKLSELKAPTHTGVQLDNLAIHFQQPIPSRGAKRRKSASSVKRFKRDTDAAALQPISAPINMPDANTACNIVKIIKPIGYSASLSDNMHDVLVTFMAMRSDGTEVMVDNRYLKAYNPLLLINFYEMHLRYTPTP

SEQ ID NO: 277884 - protein, 172 aa, Glycine max
  Clone ID: PAT_MRT3847_92952C.1.pep
VSSHGTSKQSYSGEFTPLKIYTTFTRCIIKFYALSSRRTRIATTTREKKSKEARFKSENAQQRGCCREESALDNSRSRLHGSVGVPRAPSAPPEIRGRGGGTAALLPILWRGWLRQKNLEGSVLESSVAVVQGVTTVSWVLKVGVVFFGLVIHSQSRRLVEIEGSKKGMSMR

SEQ ID NO: 277885 - protein, 57 aa, Glycine max
  Clone ID: PAT_MRT3847_92953C.1.pep
GIALEFNKPCHLFFIYIYIYFFLYIYQLRELQMGPGFLGGNFMKVGFNFEKNLGPLW

SEQ ID NO: 277886 - protein, 350 aa, Glycine max
  Clone ID: PAT_MRT3847_92954C.1.pep
PSRPRIQAFRGGLRSSIRVARAVKEAVDRNETDVRWFVFGDDDTVFFVDNVVRALARYDHSKWFYVGSNSESYEQNVKYSFEMAFGGGGFAISYSLARVLARVLDSCLRRYGHLYGSDSRIYSCIAELGVALTHEPGFHQLDMRGNLFGMLAAHPLSPLLSLHHLESVEPLFPDMNRVQALEHLIAAAYVDPARILQQTVCYDRSNSLTFSVSWGFAIQVYQGNELLPDLLSLQRTFVPWKRGSKVNANFMFNTRDYPRDPCKRPSIFFFKSVASDKRGIWSNYSGHVVGNCFESTLLKQIIVFSKKLELNNEQMIAPRRQCCNVLLTSNDTVSLHIRQCELDELISMQP

SEQ ID NO: 277887 - protein, 66 aa, Glycine max
  Clone ID: PAT_MRT3847_92955C.1.pep
MMAGKNKGVAPEDAIRAIGLGYDLTNDLKLKSCKNHSRLIAIDDDNLRTVELPARISIPNVPKCIK

SEQ ID NO: 277888 - protein, 577 aa, Glycine max
  unsure (1)..(577): unsure at all Xaa locations
  Clone ID: PAT_MRT3847_92956C.1.pep
MWHEARRSEKKVHDMMDAARKRAQRRAVYLAKRRGDPQQSIQLVGFRSRTYRDDALYQATQDQQGLIPWNGKQDVLIDRFDGRALLDFIRDSSHRRVPEKSEEEEELEEFVNFERYRDLIKHRRRGCXVSDEEALQHVNQEMEAKAAAPFTSDRSNLSQPAASKGSYSQVGFSYDGNGKEETHISDDDDNDNEEEEDDEDDEDFNSDDSNDEGMEIIAKEYGVKRYGWLVYMDKKAKEEEKRQKELIKGDPAIRKLSRKERRKASQIEREREREATRISGTRVLHHDPYRETRQSPTYEAYSRSRRSRSPLRSYSPSHSRRYSRSGHSDDIHRSKPRTPKIEYITEFGGSGAADERRPEGFSPPRSPTSQVDLLNRSEHWTFNSCQDRLDXISQLFFLIPLLFCRPTSGCILEALHVDPASGVSIDKDKGTKVLKPSVSGSSSALAKLKAGGSGGPLKQGEKKETPQERLKRIMNKQLNKQIKKDTAAELAKKREQERQRQEKLAETSRLSRYRCRSRSRSRSFSGSPPRRYRRSRSPSRSRSSRRYYSSSHSRSPSRTRSPSPYSRSPRIRNRSKH

SEQ ID NO: 277889 - protein, 35 aa, Glycine max
  Clone ID: PAT_MRT3847_92957C.1.pep
YLAYINRNWYNTHNVSRNIILRIHMYSPLKVYLSK

SEQ ID NO: 277890 - protein, 112 aa, Glycine max
  Clone ID: PAT_MRT3847_92958C.1.pep
RAESARGETRQSPTYEAYSRSRRKIYYVFLSFSLSRSRSPLRSYSPSHSRRYSRSGHSDDIHRSKPRTPKIEYITEFGGSGAADERKPEGFSSPRSPTSQVDLVNRVEHWTL

SEQ ID NO: 277891 - protein, 179 aa, Glycine max
  unsure (1)..(179): unsure at all Xaa locations
  Clone ID: PAT_MRT3847_92959C.1.pep
ARGWLVYMDKKAKEEEKRQKELIKGDPXLKLSRKERRKASQIEREREREATRISGTRVLHHDPYRETRQSPTYEAYSRSRRSRSRSRSYSPSHSRRYSCSGHSDDIHRSKPRAPKIEYITEFGGSGAAADEPRPEGFSPPRSPTSQVDLLNRSEHWTFNSCQDRLDSHFSGQHISHIVA

SEQ ID NO: 277892 - protein, 65 aa, Glycine max
  Clone ID: PAT_MRT3847_9295C.1.pep
NRKQKLSLLDSKNLSISFYFFCVRFLMGKKFTLCAGHRLRESFSFPFLVYSLNTLLFDIRTSCQI

SEQ ID NO: 277893 - protein, 137 aa, Glycine max
  Clone ID: PAT_MRT3847_92960C.1.pep
MWHEARRSEKKVHDMMDAARKRAQRRAVYLAKRRGDPQQSIQLVGFRSRTYRDDALYQATQDQQGLIPWNGKQDVLIDRFDGRALLDFIRDSSHRRVPEKSEEEEELEEFVNFERYRDLIKHRRRGCRYFFISRQCV

SEQ ID NO: 277894 - protein, 151 aa, Glycine max
  Clone ID: PAT_MRT3847_92961C.1.pep
VDKDKGTKVLKPSVSGSSSALAKLKAGGSGGPLKQGEKKETPQERLKRIMNKQLNKQIKKDTAAELAKKREQERQRQEKLAETSRLSRYRCRSRSRSFSGSPPRRYRRSRSPSRSRSSRRYYSSSHSRSPSRTRSPSPYSRSPRIRNRSKH

SEQ ID NO: 277895 - protein, 81 aa, Glycine max
  Clone ID: PAT_MRT3847_92962C.1.pep
SILKSEKRPKIGGKGRDVSVITSFRMNNIRYIVTYFEPLGSETCIDLFQYIVQVPFQITLVGFRLTLDCYALSFCGFTRGD

SEQ ID NO: 277896 - protein, 59 aa, Glycine max
  Clone ID: PAT_MRT3847_92963C.1.pep
VNKSAGPFDALLCVGQFFPDSPEQLEDFTKYIEGGSHFPLPTYFVGDYGVAAPKLLLQA

SEQ ID NO: 277897 - protein, 91 aa, Glycine max
  Clone ID: PAT_MRT3847_92964C.1.pep
SSTTAHVPPPPTDNIHLSLFYQLVLSHSFIQALHLIISTSIPNIPLMSSLHHSLASNFSSYQRNLFSTSSLKKHLNLSTAYISFISYFISN

SEQ ID NO: 277898 - protein, 69 aa, Glycine max
  unsure (1)..(69): unsure at all Xaa locations
  Clone ID: PAT_MRT3847_92965C.1.pep
RXHAYVSSEFGSXKRERERERERERASNSLXXALXLGRGXYICSSWXCYLTRLMQISGLRFRYXSDLWG

SEQ ID NO: 277899 - protein, 98 aa, Glycine max
  unsure (1)..(98): unsure at all Xaa locations
  Clone ID: PAT_MRT3847_92966C.1.pep
NVSVGGFCCLGLKEDFVEEVNVEFRESVDNEVXGIFFVCDELLVSVDFRXTDVSLMFDXLLTMVMGDDMVKVIAWYDNEWGYFXRVVDLVDIVVNKWK

SEQ ID NO: 277900 - protein, 206 aa, Glycine max
  Clone ID: PAT_MRT3847_92967C.1.pep
MVLSEEEIGRLYRIRKTVMQMLRDRNFLVGDFEINMSKHEFKSKYGEHMKREDLVINKSKKDNSGDQIYVFFPDEPKVGVKTMKTYTNRMNSENVYRAILVTQTNLTPFARTCISEISSKFHLEVFQEAELLVNIKEHELVPEHQVLTDAEKKTLLERYTVKETQLPRIQVTDPVARYYGLKRGQVVKIIRPSETAGRYVTYRFVV

SEQ ID NO: 277901 - protein, 75 aa, Glycine max
  Clone ID: PAT_MRT3847_92968C.1.pep
LTYLLIFMYFIIIYARKGGKEIYLFVGDNFHQFVCFKRRNLTLKLEQRCWMMTILKFEEVHFVSVGFDDDILTRL

SEQ ID NO: 277902 - protein, 112 aa, Glycine max
  Clone ID: PAT_MRT3847_92969C.1.pep
NDLCYAVLAIFRSRFPKTEGITAGLCMKGQCLPRVVCIHVWQSLQFCYSWILNSDHRKWMMPYLERFSPEMKYDIFRVVYVSGDNVVNLPYGSHNRMLEDEQESPQGQLMPQ

SEQ ID NO: 277903 - protein, 42 aa, Glycine max
  Clone ID: PAT_MRT3847_9296C.1.pep
RYSFLSDNLRKNCNHLRIRNLTERIRRGLIFLLQEELGCRIQ

SEQ ID NO: 277904 - protein, 172 aa, Glycine max
  Clone ID: PAT_MRT3847_92970C.1.pep
MVLSEEEMGRLYRIRKTVMQMLRDRGFLVGDFEINMSKHEFKSKYGEHMKREDLVINKSKKDNSGDQIYVFFPDEPKVGVKTMKTYTNRMNSENVYRAILVTQTNLTPFARTCISEISFKFHQEVFLEAELLVNIKEHELVPEHQVLTDAEKKTLLERYTVKETQVVHFLHV

SEQ ID NO: 277905 - protein, 141 aa, Glycine max
  unsure (1)..(141): unsure at all Xaa locations
  Clone ID: PAT_MRT3847_92971C.1.pep
DQIYVFFPDEXKVGVKTMKTYTNRMNSENVYRAILVTQTNLTPFARTCISEISSKFHLEVFQEAELLVNIKEHELVPEHQVLTDAEKKTLLERYTVKETQLPRIQVTDPVARYYGLKRGQVVKIIRPSETAGRYVTYRFVV

SEQ ID NO: 277906 - protein, 135 aa, Glycine max
  Clone ID: PAT_MRT3847_92972C.1.pep
AKPTTIQDLQTEINNLEREVKELRQQQEIHQIILSQLEEDSDSESVKNSKENQTKNLENDIFMGLINKIKIQNFYINIKININDFVLDTTALFDTGADSNYILEGLIPTKFFEKTSEKLSTTSGSKLKINYKLSN

SEQ ID NO: 277907 - protein, 270 aa, Glycine max
  unsure (1)..(270): unsure at all Xaa locations
  Clone ID: PAT_MRT3847_92973C.1.pep
MIDVSKGSLFKLEHMNMMTKLRPFVRPFLKEASEMFEMYIYTMGDRPYALEMAKLLDPQGEYFNAKVISRDDGTQKHQKGLDVVLGQESAVIILDDTEHAXMKNKDKMTIMERYHFFGSSCRQFGFNCKSLAELKSDEDETDGALGRVGGRVGQVHCMFFDKQEDFDDRDVRQMLSLVRREVLSGCVIIFSRIVHGAIPSLRKMAEQMGATCLTEIDPSVTHVVATDAGTEKCRWAVKEKKFVVHPLWIEAANYFWQKQPEENFILKKKQ

SEQ ID NO: 277908 - protein, 48 aa, Glycine max
  Clone ID: PAT_MRT3847_92974C.1.pep
LLMTINLVRDDHVNTCNRCNSIGHDRLGHAKSHVGQPVLIHGNIPTIS

SEQ ID NO: 277909 - protein, 179 aa, Glycine max
  Clone ID: PAT_MRT3847_92975C.1.pep
MGKGKGFQGLFGQPSSHGSADSQGGSSSSLSEMDSKAFLGSSSCGEAKSPISNISAQEQSSQDPAGSGGKTNENVTRTSKADQGENPSRKHHPSQKTMGRHIGTNSMEDMPCVFTKGDGPNGRRIEGILYKYGKGEEVRIMCVCHGNFLSPAEFVKHAGGGDVAHPLRHIVVNPSAAPF

SEQ ID NO: 277910 - protein, 63 aa, Glycine max
  Clone ID: PAT_MRT3847_92976C.1.pep
KKENIYYITEITFFVKSIKTEPNSNRASPSFFYSYAALAPLRYTLGGKTLSVINVYRWRTSST

SEQ ID NO: 277911 - protein, 163 aa, Glycine max
  Clone ID: PAT_MRT3847_92977C.1.pep
LGHSVNPRNYHAPPASYIGPYPAVPGVQHPMVYPRRIVSPRPIPRVRSYPAVPGGNSNSSSSGASKSSSGQIEGPPGANLFIYHIPQEYGDEELTTAFQPFGRVLSAKIFVDKVTGVSKCFGFVSYDTPEAAQSAISTMNGCQLGGKKLKVQLKRDNKQSKIY

SEQ ID NO: 277912 - protein, 62 aa, Glycine max
  unsure (1)..(62): unsure at all Xaa locations
  Clone ID: PAT_MRT3847_92978C.1.pep
QTRSIACFHIFAPRAASWLIVSVLQTGFSNVIKDFKYVHSHEWVKVDXNYSTIFITDHAHDH

SEQ ID NO: 277913 - protein, 120 aa, Glycine max
  unsure (1)..(120): unsure at all Xaa locations
  Clone ID: PAT_MRT3847_92979C.1.pep
GSSTTHYNMFCVQTNHYLGVISIEGDNPYPQFYEFDSWXETASSSDHNANKLLSYTLSHICVIDQNRTYRXSQNSCDHNRNISLXKDSGHRTIAWLDKLKNTYRSLSTLQIXLNIQRVMQ

SEQ ID NO: 277914 - protein, 850 aa, Glycine max
  Clone ID: PAT_MRT3847_9297C.1.pep
MAGGIDMSLDDIKKRSAAAVASRRRFTVVHNPARTTPYPIPQVRQQSMVALFPEMVLEESGAAKIESGTKLYLSNLDHGVTNDDIKLLFSEEGELKSYTIHYDQSGRSKGTAEVVFVRHSDALLAIKKYNNMRLDGKPLQIELVGTSLATPAVAPLCQNNLMGRPNDVHFSTRGRVGDSGFHNDFAQGYLPRGRGEEKDHIRKVSFRDLDHSFERFHRTQSQRSYAKVNGNFGKVTAKDLDDDLERYHLEAKRIKKQNGKPSTPSSWYFVVKIMVRTRGLCRALGKVVGRALGREDNRDSDESLQQRRPTTSARRHREIAAVAEESPHLDDAAEEVFQQPEGVVVDDQGFPGGPRDTSVLTAYADHVVVIVCNGELSSYGRQVHKFGRPATEIEGLVVATRLSPLIACSLDIVDQKLIYVFTERWHKVFLVANTEHKGPTFLEFIARSRICFLIDHWTQKTNVFWVHCKKWDGSSLGFIACKGFYKDSENLKRVAWGLDETSSFHLPVGEVVITLNDVASLLHLPIIGAFHSFETLHVDEAVLMLVELREVSEDEVKAQTVQCHGAYAEHWTITARAYQLHFLGCTFFANKSATHVHVVFLDTFRDLYQSESNAWGAASLVHMYNDLNNACKSDNIQLVVYITLLQHFPSVAEGFTDEDYDERSPCAYHWTYTKALPASTYRKRLDRLTTANVCWMPYGAIMQLETLTRFHTIPPYFPGSRLCVEDIDDRWMHFSDYLAPLGDPPKHPPIVQDETYVEPDMPQYLVVAAAMEEAFAHAPSDLEQPRHAMEACQAIAERLERLFNLRIVTEGTKTYVVMQDCLRIARGVTVDHNVYVMSRRRGVQITHVDI

SEQ ID NO: 277915 - protein, 49 aa, Glycine max
  Clone ID: PAT_MRT3847_92980C.1.pep
ILLLLNLLCPLQTHSVPHTCGAYSTLRDYETLEGSLCLHRMPKCSERRS

SEQ ID NO: 277916 - protein, 257 aa, Glycine max
  Clone ID: PAT_MRT3847_92981C.1.pep
VWMAAVLCRARDFRRQRPALTGVGYLLLLVRASVGFALHVVGVYWWYQNDDLMYPLIMLPPKDIPPFWHAIFIIMVNDTLVRQAAMVFKCILLMYYKNSRGRNYRKQGQMLTLVEYLLLLYRALLPTPVWYRFFLNKEYGSLFSSLMTGLYLTFKLTSVVEKVQSFFAAVKALSRKEMHYGAYATSEQVNAAGDLCAICQEKMHAPILLRCKHIFCEDCVSEWFERERTCPLCRALVKPADLRSFGDGSTSLFFQLF

SEQ ID NO: 277917 - protein, 56 aa, Glycine max
  Clone ID: PAT_MRT3847_92982C.1.pep
SILQLLLTKNIFIFKVFLICSYLSLKNCSIRQNSIFGKTHDDIFDPLYLCLFVISY

SEQ ID NO: 277918 - protein, 55 aa, Glycine max
  Clone ID: PAT_MRT3847_92983C.1.pep
EWTRCSTNYSSCRRAWQTVLIIACIGRLFLTLLLRRRESPNSGWWIVTTSSRNHC

SEQ ID NO: 277919 - protein, 40 aa, Glycine max
  Clone ID: PAT_MRT3847_92984C.1.pep
FDQLKPNLFGQIYLPNLTAHNQYFFLFTTTTYLFSCSFSK

SEQ ID NO: 277920 - protein, 173 aa, Glycine max
  Clone ID: PAT_MRT3847_92985C.1.pep
YLQEVELECSEDLVPGLLTCSGWHAAVSNRNTLKELVIGIASNPASKHSAYIQFSRGEIQEYVSKIGISRGSLEQEHQGFSAACPWMSVALVGSAGLSKSVLFGLDEIGRLHANAGILCNNCSSFSFYSNLADQVITHLILATKQDLLFIVDIADVFNGELDSKYSNFVRINS

SEQ ID NO: 277921 - protein, 71 aa, Glycine max
  Clone ID: PAT_MRT3847_92986C.1.pep
TRLIKSEEIREVLRPAQKKVVRRVRRLNPLRNQQAMLRLNPYAAVLTTNAILTIQKRMKPRAELLAKKRGV

SEQ ID NO: 277922 - protein, 46 aa, Glycine max
  Clone ID: PAT_MRT3847_92987C.1.pep
KPMVFEMIHWVYCRPPPRTENLTNFRPTYCTVPCTVAEILCLAFAA

SEQ ID NO: 277923 - protein, 137 aa, Glycine max
  Clone ID: PAT_MRT3847_92988C.1.pep
KKQPPPPRGDIFGSNSKLTGGGFPPKKTQTFFSPITEAGGLKQGGNPTPNRVFPFWEKKKNPNPKRGGPGNPPPLIKGPWDNPQKKKGPRRSQYSRKANQPTTCFGGAGFAHGKSQSSLFFTPPHHKNQFFKLFLAV

SEQ ID NO: 277924 - protein, 57 aa, Glycine max
  Clone ID: PAT_MRT3847_92989C.1.pep
SVVSALSHARLVCPSSWLFGVPRSFGHHRSLGPPFLMSRGRWALNLPICAPNYYHPE

SEQ ID NO: 277925 - protein, 141 aa, Glycine max
  Clone ID: PAT_MRT3847_9298C.1.pep
MAAAANPVVGSHIWVEDPDVAWIDGEVLEVKGEEIKVLCTSGKTVVVKASSIYHKDTEVPPSGVDDMRKLAYLHEPGVLDNLRSRYDINEIYTYTGNILIAVNPFIKLPHLYDSHMMAQYKGAAFGELSPHTFAVADAAYG

SEQ ID NO: 277926 - protein, 78 aa, Glycine max
  unsure (1)..(78): unsure at all Xaa locations
  Clone ID: PAT_MRT3847_92990C.1.pep
MSVLRPMDKLPDLNRATILLVSTEDALLXQLAESVLKIDCATELSVHLANSLPLPSNANRPRIDLIVFVINLHSKYSL

SEQ ID NO: 277927 - protein, 49 aa, Glycine max
  Clone ID: PAT_MRT3847_92991C.1.pep
DKLHTSNNNYIYKYVYRLLPIKFSYWYLVMKFNLKLHPHRIGRSALLSP

SEQ ID NO: 277928 - protein, 55 aa, Glycine max
  unsure (1)..(55): unsure at all Xaa locations
  Clone ID: PAT_MRT3847_92992C.1.pep
TAIKPPFTFWPSFVNWNWTNPWIFWAGPLNGGGNPGPVXKVVFINPTPEQLSPPD

SEQ ID NO: 277929 - protein, 153 aa, Glycine max
  Clone ID: PAT_MRT3847_92993C.1.pep
MIMDSLLSILFFLLTLSSLNPSFASQPSYQDHCGSIVPESTPNENTHNSSPFDDHQRGYFTGGDSIIDGGTSLNQYFDLQPMYIRATKFSDLFNVEATVSLTSSISYYWNSSHGDSLRYERKRRYRRNHVYFKLEGFWSESSGKACMVGKGKG

SEQ ID NO: 277930 - protein, 69 aa, Glycine max
  unsure (1)..(69): unsure at all Xaa locations
  Clone ID: PAT_MRT3847_92994C.1.pep
GKGRYDGKQWGYGGKTKGVLEKKGKTTKKIVVRLQCQXCKHVWEKAIKRSKHFEIGGDKKGKGTSVVVV

SEQ ID NO: 277931 - protein, 52 aa, Glycine max
  Clone ID: PAT_MRT3847_92995C.1.pep
HLLTIVSLRINLLDYQHEQYLEHMTTIIITLKTFIIYLHRYIILSIASEWID

SEQ ID NO: 277932 - protein, 101 aa, Glycine max
  Clone ID: PAT_MRT3847_92996C.1.pep
LIYYISSVAKRNNKIGAEESRASYASALPGNDFNALLAQETFSDNSLKRKVRPFWFMRGAHNPKSPLHATKPIRVASFCEKANWGNEFMNCCNRIFVIPRS

SEQ ID NO: 277933 - protein, 324 aa, Glycine max
  Clone ID: PAT_MRT3847_92997C.1.pep
SNYCTMESKQEAPSVILNLMGLDQVPTQHPIRDKQKVLSENYLQKVASIGVRKKRSSHQHHSSGMNTSEKEEFEDVLKVVKALRRGKHHNPSKGNGKENPISCKNSNLDDGLLQEIFYPKSMRLYPEMRERKKISYHMNSGKQSSRPLSKISEEISMPSGNVANGVLGTASSSFFRGNEAFSNDNMLKPASNISVNEIQCNSPFLCSDTRTNTLAQGDATEKLQELGRCGQDCIHNQLPMISEHGNGTRNLTRQSGYSYDKIIKNIRCKAGVNYSFARRVSIPLCAASVIADNGRTMNQDILFQRYWGLRKNASANWLSWEVEE

SEQ ID NO: 277934 - protein, 103 aa, Glycine max
  Clone ID: PAT_MRT3847_92998C.1.pep
LSRSNCPRSCHAQSSGRARVCLLNIVRKDTSSFVTVASNSRRNENPATIGGCGNQQPPKSTFVNRTRYRQIDVLVCRGLPMFWCYCSRPFMLFELSCSLNWYV

SEQ ID NO: 277935 - protein, 54 aa, Glycine max
  Clone ID: PAT_MRT3847_92999C.1.pep
AVLITSCSWFSSTHTDTISSHYTEPLFIRHSLFNCTTPASRVVGFKRRSLEQDR

SEQ ID NO: 277936 - protein, 153 aa, Glycine max
  unsure (1)..(153): unsure at all Xaa locations
  Clone ID: PAT_MRT3847_9299C.1.pep
LEGNSSFDIKSRSRMEKVLSTEAQFEGGKTFQCDVIGAGAHSSEDFPEKEDHDKPKKIDARVRQRLDPQYNEVQAQMETNSVELSLDDVETPKGSMTDLKNSQXKIALSKNTVGGTTLRRELLANFXTDGNFRARVDLQSTHRIKGMIKMAAT

SEQ ID NO: 277937 - protein, 72 aa, Glycine max
  Clone ID: PAT_MRT3847_929C.1.pep
KKNKSKLFSRKNLKTRGKKKKLQQDDGEVWKGPNLLSYTATPRTKSNKTLTGAYCSSSTRRSTATSLMVRLL

SEQ ID NO: 277938 - protein, 61 aa, Glycine max
  Clone ID: PAT_MRT3847_92C.1.pep
HTNLQQPLLLLTNYLNNDESLCAVAAPSLTTYYAVEEAALMLFLFTLKPSTKKTTMSSRTS

SEQ ID NO: 277939 - protein, 120 aa, Glycine max
  Clone ID: PAT_MRT3847_93000C.1.pep
KKPKDKKKKKGERGEKNRKKGKKRKKKKKKKGGGGARDPISLGNKGARGVKGGGREAMEGPFCPPRGSRGFWEPINQKTQHGVGWPGVPRPGGGGGRQPPERPSPFPGVPKGPPGTPWAR

SEQ ID NO: 277940 - protein, 75 aa, Glycine max
  Clone ID: PAT_MRT3847_93001C.1.pep
GFLKTGGFCFFFFFFFWGKEKLILAYYPKGQKLIGPVSISFLLMGKWKSYPKGIPNLLKAFLLKNDPRIFPKKRF

SEQ ID NO: 277941 - protein, 72 aa, Glycine max
  Clone ID: PAT_MRT3847_93002C.1.pep
QLPPSATQCLIHYSDHMTILRRFEPPLQWNVIVLHNEIGDIYVVQPWYKFLQESDFSHGDEVSFYYRRDEKI

SEQ ID NO: 277942 - protein, 74 aa, Glycine max
  Clone ID: PAT_MRT3847_93003C.1.pep
ICLNVLYRIGECSANILRMVNIMLHEVCDHLREVTFFPLSNRPHLSRKKLKNSCNQGTIAFVYGLKVRHPMLAV

SEQ ID NO: 277943 - protein, 67 aa, Glycine max
  Clone ID: PAT_MRT3847_93004C.1.pep
MASQSQVQISKLRVSVLPESDSGTTSSPKGQCLCSPTTHEGSFRCRFHRSVAASSSPPSWMKRSDNN

SEQ ID NO: 277944 - protein, 99 aa, Glycine max
  Clone ID: PAT_MRT3847_93005C.1.pep
MLEAKCLKKAVVPSTLIQDPSPGSLQCTRLALRVSEDQSSCFVYIASGPHIYRLHIALGESSISEGKDSLLIPEHTEIIAFVVTQSMPSSFRNSEYCSC

SEQ ID NO: 277945 - protein, 87 aa, Glycine max
  Clone ID: PAT_MRT3847_93006C.1.pep
YKLLFIHTPYSMLYIHILPSYSNIMPYGNDSIDLPRHLHYAVLPMDVRVTGLYHLLSFSIGVAWRLKWSCRRSPIRCPCPHILYIGH

SEQ ID NO: 277946 - protein, 29 aa, Glycine max
  Clone ID: PAT_MRT3847_93007C.1.pep
MIDCFNFYESPCFCVMLKQISVFNLKIKR

SEQ ID NO: 277947 - protein, 307 aa, Glycine max
  Clone ID: PAT_MRT3847_93008C.1.pep
MTLTTAFSCSLAAASLSTAASFRRNKCTTSKIFHSSSTCMPSFLHDHHYHSFLLRVANDADRSEVSSDTAIKTSYSEADKMVDGMDFGELCNEFECISSPLVESTARQLARDILELREGNRALGIFAVSVAYKDPIRSFTGREKYKRRLWATGALDNPSVTVQEMVMLSTSVLSIKWTIRGKPKSVLGGDLIIRVTSKFTLNQISGQVIEHEEFWDLSASSASAQAFFWTSRALFAAVESVKDLGDSAKNLSSKMSTKKENLEMYPDPSGDPTKFFQRDDSFQQDAYQIALLLAVIYLVVQFLRTTL

SEQ ID NO: 277948 - protein, 69 aa, Glycine max
  unsure (1)..(69): unsure at all Xaa locations
  Clone ID: PAT_MRT3847_93009C.1.pep
AGTYXXHQRHVLXLVMSFRKITAQVTNTTTSSIXAXASXSEQEFVXHDRAQLXRVXRXHXXGXAKVPSG

SEQ ID NO: 277949 - protein, 45 aa, Glycine max
  unsure (1)..(45): unsure at all Xaa locations
  Clone ID: PAT_MRT3847_9300C.1.pep
XIEDRESSSFYSNMGRYIPRSRRGLTGYIYLVIWGGSPKIEGKGP

SEQ ID NO: 277950 - protein, 137 aa, Glycine max
  Clone ID: PAT_MRT3847_93010C.1.pep
SGGIKKNKSFSKPLIVIMNSFSLLFLKKMKIRDQCCCCNVGNTMGGRLCPCLCNTETNSYHFLLRHLPGDFGENGFWEENKYCDAVRATSDSAGFEARNDGGSVAFSRRRALTPASLLVFAIAGCSDSSATLFRTRG

SEQ ID NO: 277951 - protein, 72 aa, Glycine max
  Clone ID: PAT_MRT3847_93011C.1.pep
SAVRALRPSTLPLKTLLLPLLWYGGLYVLFSLKESCIWLTVGINKPKVYIVCVSNPLTVQLCSCPPSHKDLS

SEQ ID NO: 277952 - protein, 101 aa, Glycine max
  Clone ID: PAT_MRT3847_93012C.1.pep
PCCHLHSETSICGPMSSSCNIYSQALLALVSCHTYCTSGQSQLVLSSFSSNIFSSLFDFFVTSFLASVLAVSPVGAYPVSDFCLPSFSASFLEFSEQHQSK

SEQ ID NO: 277953 - protein, 55 aa, Glycine max
  Clone ID: PAT_MRT3847_93013C.1.pep
GCKNKKCERLQNNSCCTWNYGKSPKDTVIWCSSPLFIRSANKVLHPHCYMLFSWS

SEQ ID NO: 277954 - protein, 61 aa, Glycine max
  Clone ID: PAT_MRT3847_93014C.1.pep
ECKRLSILGSLYTAQDVIFFPLSHRALVSSKNLRDSCNQGTMAFVSGFDVRQPVIAENPKC

SEQ ID NO: 277955 - protein, 54 aa, Glycine max
  Clone ID: PAT_MRT3847_93015C.1.pep
MNRFLGLVTLLFLSCLLHYCRCLSFNSTHHLPRFFSFFIRPSLSDAWRPEFRTG

SEQ ID NO: 277956 - protein, 52 aa, Glycine max
  Clone ID: PAT_MRT3847_93016C.1.pep
TWAFRGYTSIADLFGGTPRSPTVRSRSSSAVCCLNRPEGWTDACGEWGIGDW

SEQ ID NO: 277957 - protein, 104 aa, Glycine max
  Clone ID: PAT_MRT3847_93017C.1.pep
NPTFARDTSCCIARTPCHHTWLPTTLARLTPPMGQPWQTNHPSHPACVWLTCSSAPANTLINPFPTKDAHRACALNRCGPTPPDLNFTTWGIRPKDNLWVAHTV

SEQ ID NO: 277958 - protein, 36 aa, Glycine max
  Clone ID: PAT_MRT3847_93018C.1.pep
AFTQSSFLFTTSKGQKKKSADLVLMSRSDAQEVKAR

SEQ ID NO: 277959 - protein, 115 aa, Glycine max
  Clone ID: PAT_MRT3847_93019C.1.pep
TLLSPHSPLTKTCWFPFSPLGGGVAQKWGPRPRTFFKGGLTFPKWSGFLVSNFFFPKHFSVQRGFSPHWSPPLGFPLLWRIFFLPPPLKLWFFFPFPKINKSKKKKRKIPNIHRY

SEQ ID NO: 277960 - protein, 239 aa, Glycine max
  unsure (1)..(239): unsure at all Xaa locations
  Clone ID: PAT_MRT3847_9301C.1.pep
MAEKSCIKRLQKEYRALCKEPVSHVVARPSPSDILEWHYVLEGSEGTPFAGGYYYGKIKFPPEYPYKPPGISMTTPNGRFMTQKKICXLSMSDXHPESWNPMWSVSSILTGLLSFMMDNSPTTGSVNTTTAEKQRLAKSSLSFNCKNATFRKIFPEYVEKYNQQQLSEQAAPERVSLDTSPDKSSRPVLEKKLESNGEDMKRVDGLKEVRKNRKPFPTWMMLLLFSIFGVVMALPLLQL

SEQ ID NO: 277961 - protein, 32 aa, Glycine max
  Clone ID: PAT_MRT3847_93020C.1.pep
FSCGVIITEYYFTCTWCSELRIEKGNDEINKS

SEQ ID NO: 277962 - protein, 96 aa, Glycine max
  Clone ID: PAT_MRT3847_93021C.1.pep
QLFTGAKEHLAPPCLLRVPWRKLHPPDYQATSVILMRQGLTCCTRLRLYANSLCGKNNRRTPFHRFGTLCKHQWLRSGTNGYSPQCPTDPSLLDST

SEQ ID NO: 277963 - protein, 68 aa, Glycine max
  Clone ID: PAT_MRT3847_93022C.1.pep
TDQGPSLFESTETQLSVTSSQTGQLNITMSLISYFSAVLPGLSEHVNCGFAYHPLLSPQLGEKSVDMA

SEQ ID NO: 277964 - protein, 721 aa, Glycine max
  Clone ID: PAT_MRT3847_93023C.1.pep
MSLSAFSFPLHLRQTTPPSDPKTSSTPLPLSSHSHWGADLLTQSQRKLNQVKRRPHGVCASLSEMGEYYSQKPPTPLLDTINYPIHMKNLATKKLKQLADELRSDVIFHVSRTGGHLGSSLGVVELTIALHYVFNAPKDKILWDVGHQSYPHKILTGRRDKMHTMRQTDGLAGFTKRSESDYDCFGTGHSSTTISAGLGMAVGRDLKGDKNNVVAVIGDGAMTAGQAYEAMNNAGYLDSDMIVILNDNKQVSLPTANLDGPIPPVGALSSALSKLQSNRPLRELREVAKGVTKQIGGPMHELAAKVDEYARGMISGSGSTLFEELGLYYIGPVDGHNIDDLVSILNEVKSTKTTGPVLLHVVTEKGHGYPYAERAADKYHGVTKFDPATGKQFKSNAATQSYTTYFAEALIAEAEADKDIVGIHAAMGGGTGMNLFLRRFPTRCFDVGIAEQHAVTFAAGLACEGLKPFCAIYSSFMQRAYDQVVHDVDLQKLPVRFAMDRAGLVGADGPTHCGAFDVTFMACLPNMVVMAPSDEAELFHMVATAAAIDDRPSCFRYPRGNGIGVELPLGNKGIPLEIGKGRILIEGERVALLGYGSAVQSCLAAASLLEHHGLRATVADARFCKPLDRSLIRSLAQSHEVLITVEEGSIGGFGSHVVQFMALDGLLDGKLKWRPIVLPDCYIDHGSPVDQLSAAGLTPSHIAATVFNLLGQTREALEVMT

SEQ ID NO: 277965 - protein, 57 aa, Glycine max
  Clone ID: PAT_MRT3847_93024C.1.pep
PTRPLRRIQVQMDSMCPPQKDMTMLMIHSFLVFFNSFATKRKLAFYIPSSTGQISMY

SEQ ID NO: 277966 - protein, 78 aa, Glycine max
  Clone ID: PAT_MRT3847_93025C.1.pep
SAFFSPLICLTISLFGCFTCFLLCSLVSLLSTFNCFHCFLLTSLYLEISSRLDCLFSSLLLPCSSPPPFMIWPLVSVC

SEQ ID NO: 277967 - protein, 56 aa, Glycine max
  Clone ID: PAT_MRT3847_93026C.1.pep
LGPPQKKEKKSGAPKNGGEKLLKFRGTPEYPWGKNFCFFIKTIPPPSGESKKTRPH

SEQ ID NO: 277968 - protein, 59 aa, Glycine max
  Clone ID: PAT_MRT3847_93027C.1.pep
LSTGYSCQQAFHSSIFSVLVLQLSFSFILQMLDFNLKISIFNHLRCTFSFVIKKVIVIP

SEQ ID NO: 277969 - protein, 39 aa, Glycine max
  Clone ID: PAT_MRT3847_93028C.1.pep
LPRIDNKNFQSIVKLHDSTQQIKVNNNDIYVIYSPTIAS

SEQ ID NO: 277970 - protein, 330 aa, Glycine max
  Clone ID: PAT_MRT3847_93029C.1.pep
MQTPKARVGMSEVPQKKSPATPRTAHQLKTPNSDADSVSSPNAAKKTSKDRSPKIIERRSPHSPISEKKRPSKVQELESQIARLQEDLKNAKDQLNSSESWKRKAQQEAEEAKKQLVDMMKELEESHQQLLDFSASEEVRLQELRKISQDRDREWQSEIQAVQKQQAMDSAALASAMNEIQKLKIQLERVCESEATQINSAESAHAEIQELKMELDKTLFLVEKLKSELSDYKESESRVMEVVGKMQMQLETANQTVETLRSDGMKAAEAYKSLALELEQSRTQAKSLEALVSKLQADLLSSANKSISGSTPTNENGPSQENEENEEINQ

SEQ ID NO: 277971 - protein, 60 aa, Glycine max
  Clone ID: PAT_MRT3847_9302C.1.pep
FPFFGKTPGKIVPPKGPNDFGGGPIFDPGGFAPTFVQMPQKKKTKISPPQIFCLGEIPFF

SEQ ID NO: 277972 - protein, 99 aa, Glycine max
  Clone ID: PAT_MRT3847_93030C.1.pep
LTMAFQHENGSNIDPNPIGVETAMASQHENGSEIDPNPTGVETSMSSLHENGSEIDQNLIGAEAHEAEAEKFGTLGCAGPIEEGLEKITLVGYFLSVEE

SEQ ID NO: 277973 - protein, 108 aa, Glycine max
  Clone ID: PAT_MRT3847_93031C.1.pep
DRLMSALLHILYLDKHMMTLCITPKGSMRYEPKSAPIDLHFQWLGLALDTSANIIVQLCIMSLTTTLVLFTVSNTLKRTSIPRYASINQLNHDRTGNTESTSDTKVTD

SEQ ID NO: 277974 - protein, 163 aa, Glycine max
  Clone ID: PAT_MRT3847_93032C.1.pep
GGYKWSLSIYPTGNTKGGGEGHVSIYLVLMDSSSLPVDWEVNAIVNFSAYNFIDDEYVATQDTNVLRFHVLKTEWGVAKFIDIDTFNDPSNGYLMDDTCVFGAEVFVVKTTTKGDCLSMIHGPIPLSHSWKFDNFSLAKLDKYQSESVVGGNYRWNLILYPNG

SEQ ID NO: 277975 - protein, 142 aa, Glycine max
  Clone ID: PAT_MRT3847_93033C.1.pep
MIVRMDPSHHIEQQEDDEWDTEGFVIPSLGIEDSDQDKPHVLDIESSDSASKAKKDENIYLGPHGAHPSLAKQQELNSSNRKQKFKQKLKEADKRISGTGRENKVDNLRELVGGGKLSVNNAKESPKDWLDPHCQESEFERR

SEQ ID NO: 277976 - protein, 66 aa, Glycine max
  Clone ID: PAT_MRT3847_93034C.1.pep
TLDHHNHVNRNNIPSHRPLPKPHQPFHSLLLSNPHPSNAPSNSIPKPRTSPTPKIASSTSPLVPQP

SEQ ID NO: 277977 - protein, 45 aa, Glycine max
  Clone ID: PAT_MRT3847_93035C.1.pep
SDSVQMKNMFIRKRLTKILWLLRETLMKPSLRQKCACLWIDLCHA

SEQ ID NO: 277978 - protein, 55 aa, Glycine max
  Clone ID: PAT_MRT3847_93036C.1.pep
SFVRQANNLRPQTIPRVHQFLTTHQCAMCLVTIFESFHCHRALSSLWSTHPRQDQ

SEQ ID NO: 277979 - protein, 66 aa, Glycine max
  Clone ID: PAT_MRT3847_93037C.1.pep
SYTYGKGGKQNHSPFYIKLINTLTPGPERQPTLQSLNTLIYTTYAQIDIDLYKKPGGRGITDTCIK

SEQ ID NO: 277980 - protein, 157 aa, Glycine max
  Clone ID: PAT_MRT3847_93038C.1.pep
MRSLSANPSLLRQAVPVLVKPYKSILSRAFLFSSPASTSHSHNTQFLRSVTFFSTTSLRNFNSRATHLNDAGSIDSPLIQSMQNKIKEQLNAESVSVKDAYGDGRHVSIDVVASAFEGQSAVNRQRMVYKAIWEELQTVVHAVDQMTTSTPAEAAAK

SEQ ID NO: 277981 - protein, 66 aa, Glycine max
  Clone ID: PAT_MRT3847_93039C.1.pep
GHGVSVWCSLIVSATLIKLAFAICFYLLDFSYTIDHESSVCKISLELDTCLTDILNYVSIYCLIWI

SEQ ID NO: 277982 - protein, 110 aa, Glycine max
  unsure (1)..(110): unsure at all Xaa locations
  Clone ID: PAT_MRT3847_9303C.1.pep
MADMGATVCTAISSPSSVNKDATLSPAPTELLTESMMKTVTDQVFSGRQSYCPNGDIDAVPYSSEIEYYLTGENAGYYGXDTADLSEHPDTXTQNRDLELIHSTSSDVGT

SEQ ID NO: 277983 - protein, 81 aa, Glycine max
  Clone ID: PAT_MRT3847_93040C.1.pep
IASRAPFLFFSLLFRVRLLSTRVTNALGGGSPQLAQVSVSAAMTLAASGAILVSPIIFACRQVEGYAFSNELDVVDYFTEM

SEQ ID NO: 277984 - protein, 78 aa, Glycine max
  unsure (1)..(78): unsure at all Xaa locations
  Clone ID: PAT_MRT3847_93041C.1.pep
NSGEKKVTCIQALKGKXGDTIIASVKEAHXKGGGCDESEVKFDDKQGQPIGTRVFGPVPHELRQNNHVKILTLAGHIA

SEQ ID NO: 277985 - protein, 561 aa, Glycine max
  unsure (1)..(561): unsure at all Xaa locations
  Clone ID: PAT_MRT3847_93043C.1.pep
QVQSLIFLPSCFEEAMGGDATAAAESATAESNAANGVNINIRCSNGSKFSVQIGLDSTIRSFKDAVAHNCDISADQQRLIYKGRILKDDQTLQSYGLEADHTVHLVRGFAPSNTTGGTNSGGGGNTTTANTRGAGANERWGFRRAEDFGASLFPGLGGNNGMKGSFQFLIWSNKSXAFPDLEQMQQPLXSNPNLMRDIMNTPAMQNLINNPDIVRNLIMNNPHMQELMDRNPELAHILNDPSTLRKTHEATRNPEIMREMMRNTDRAMSNIESSPERFNMLRRMFESLQEAXLKGHSKNPSPTXMLSNYWCSLTQNYPTTNTEATLPVPNTNPIPHPWSSTGTGGGQNNTRRSTTTGGEARQSTPTGLGGLGLPDLESMLGGTGMPDPALLTQLMQNPAISQMMQSILSNPQTLNQILGVNNEQRGMPDLNSLREVMQNPEFLRXFSSPETLQQLLSFQQALMSQLGQQQSTQEPGQTGGGTGPMNNLGLEMLSSMFGGLGAGSLAVPNRSNEPPEQLYATQLSQLQEMGFFDTQENIRALIATSGNVHAAVERLLGNSGQ

SEQ ID NO: 277986 - protein, 150 aa, Glycine max
  Clone ID: PAT_MRT3847_93044C.1.pep
QTMNQILGVNNEQRVRPDLNSLREVMQNPEFLRLFSSPETLQQLLSFQQTLLSQLGQQQSAQEPGQTGGGTGPLNNMGLEMLSSMFGGLGAGSLAVPNRSNEPPEQLYATQLSQLQEMGFFDTQENIRALIATSGNVHAAVERLLGNPGQ

SEQ ID NO: 277987 - protein, 133 aa, Glycine max
  Clone ID: PAT_MRT3847_93045C.1.pep
DLNSLREVMQNPEFLRLFSSPETVQQLLSFQQALMSQLGQQQSTRESGQTGGGTGPMNNLGLEMLSSMFGGLGAGSLAVPNRSNEPPEQLYASQLSQLQEMGFFDTQENIRALIATSGNVHAAVERLLGNSGQ

SEQ ID NO: 277988 - protein, 124 aa, Glycine max
  Clone ID: PAT_MRT3847_93046C.1.pep
VGKLARVTAPGAPIIIVTWGPRGFGPFEQSFPPWGQDFLKKIWEAYSPPAGGPPFDYVKVVQTPSLRGLKSKNWSPFVAPFWPPVIRPPFPRKGLTSLLGRGQKTIKGALGFPFLIKGSQKNLI

SEQ ID NO: 277989 - protein, 551 aa, Glycine max
  unsure (1)..(551): unsure at all Xaa locations
  Clone ID: PAT_MRT3847_93047C.1.pep
MGGDDAAAESATTERNAANEVNINIRCSNGSKISAQIGLDSTVRSFKEAGAHNCDISSDQQRLIYKGRILKDDQPLQSYGLEADHTCHLVRGFSPSNTTGGTNNGGGGGGNTTTANTRGSGANEGGGLGGPGFGASPFPGLGGNNGMGGGGLNGLFGAGFPDLEQMQQPFLSNPNLMRDIMNTPAMQNLINNPDIVRNLIMNNPQMQELMDRNPELAHILNDPSTLRQTLEATRNPXEIMREMMRNTDRAMSNIESSPEGFNMLRRMYENVQEPFLNATTMAGNTGNDXQQFQGGGHARDHSTNPSTTNSEATAGSPLPNTNPLPNPWSSTGTGGAQNNSRKSLTTGVDGRQQGPTGLGGHGLPDLESMLGGSAMPDPALLTQLMQNPAISQMMQSMLSNPQTLNQILGANTEQRGMPDLNSLREVMQNPEFLRLFSSPETLQQLLSFQQTLMSQLGQQQSTWESGQTGGGTGPMNNLGLEMLSSMFGGLGAGSLAVPNRSNEPPEQLYASQLSQLQEMGFFDSQENIRALIATSGNVHAAVERLLGNSGQ

SEQ ID NO: 277990 - protein, 173 aa, Glycine max
  unsure (1)..(173): unsure at all Xaa locations
  Clone ID: PAT_MRT3847_93048C.1.pep
GPDSPSTHASGENNCVFWSYVYLVNGSPMAEFGVERGLKQGDPLSPFLFLMAVEGLCGLVKKAELVDVFKGFRINDSISXFPSLPYADDSILVGEACXEEHLAIKGIVRSFELMSELKVNFLKSKIYGVNVSNDFLDGASDFLYCYSAMIPFKFLGIPIGARWKNNFDKCSAI

SEQ ID NO: 277991 - protein, 48 aa, Glycine max
  Clone ID: PAT_MRT3847_93049C.1.pep
FYLYLSSKKVSIILKVQHLILTPSISNFNIDFSFQKSKTSLLSSSRSR

SEQ ID NO: 277992 - protein, 150 aa, Glycine max
  Clone ID: PAT_MRT3847_9304C.1.pep
PRVPKNIEFAHWVGRPNQKEIRVPGPTKRPVPLEPCLFYFGELSKICESEKFLPQGLKAAKKKASKKKNLPAGGGFGPKPGISPGHAKARVQKRENTSPPKHHGANFYGTGKGYQKNGNGQTNWELRKPNASMLLMLINKLSKKSLLPVC

SEQ ID NO: 277993 - protein, 52 aa, Glycine max
  Clone ID: PAT_MRT3847_93050C.1.pep
CVIRRVAYRDGETLTVMSCKHLNHPECIHNWLKIDKVCPVCRPEVFASGSNL

SEQ ID NO: 277994 - protein, 73 aa, Glycine max
  Clone ID: PAT_MRT3847_93051C.1.pep
MERRKGSGSFLTTEDLRRETGINCSGRHEELVDHRRRAVFRHRDALQRGGANAQGKWSNELLIQNVEAPQVQC

SEQ ID NO: 277995 - protein, 118 aa, Glycine max
  Clone ID: PAT_MRT3847_93052C.1.pep
KKNPPGPHYGTPLSRGVAHFFFPFGPPGFPPANGAVGPPHLVSVGSPFWPPGLFPFGFRAVFFFQFGPGFIFPRGPLLPFFPPGFIAPPLGESLVPPPRSPPRYFPGVGPQGYKCGVF

SEQ ID NO: 277996 - protein, 126 aa, Glycine max
  unsure (1)..(126): unsure at all Xaa locations
  Clone ID: PAT_MRT3847_93053C.1.pep
TSSSPVSSSVDQSEGNGGFGXITKXXFVEDAASKSVLYNIESVDEVTCGYSYSVVGGVGSPDIVEKIIFECKLVVGDNGGSVGKFIVKYXLKQMLSXNLDDFKIGKVKSDDIFKAVEAYFLVNPHY

SEQ ID NO: 277997 - protein, 81 aa, Glycine max
  unsure (1)..(81): unsure at all Xaa locations
  Clone ID: PAT_MRT3847_93054C.1.pep
ERVLESFEKGGMDGDVAKLKGLFDNSKEKNIAIVCRIVRXNVWGDDVEKQIEDLNVGFSSEVVKTVLESLVLEPVKALIFF

SEQ ID NO: 277998 - protein, 126 aa, Glycine max
  Clone ID: PAT_MRT3847_93055C.1.pep
MVFRSSTSLIGLLSLLFLLSVSSAIRLGLVRRPSPELPLFREAPAFRNGEDCGSSPSATINVAMTLDTNYLRGTMAAVLSMLQHSTCPENLAFHFLSSHDDPPELFSSILSTFPYLKMKNYPFDSN

SEQ ID NO: 277999 - protein, 615 aa, Glycine max
  Clone ID: PAT_MRT3847_93056C.1.pep
MEPQLESPLGRKDSTGSADSSKPSKHVIETAAPFESVKDAVSKFGGRIDWKSRRTQSLVEERSKLVEDFRKEETAEELENTKKLIEELKTSLEKIEKDELQAKEEAERVILKIEEMEQDIVSEASIEAKAQLEAEKAMLTEALSEFEFVKRELDSLRKEYASMASGRDIAINNAEETIAASKQIEKAVEDLTAELIATKEALNSMRTAHLEVEEQRLGVVDQESNNLKLELEQVEEELQRLNEQVLSARVLKSKLESASSLLHGLKAELAAYMESKVNEEFYKEQKEEVEELKLNIEKATSDVNRLRVASVSLKSKLEEEKSVLASLKQSEEKASAAVVNLQAELEKSRSAIAFIQMKENEAREMMTELPKKLQKASQEADEAKSLAQAAQAELIEAQEEVEQAKAKSSTLESSLLAAQKEIEAAKVAEMLARDAITALEKSESAKGNKNDKDSSSMVTLTLEEYHELSRRAYKAEEQANARIEAATSQIQIARESELRSLEKLEELNEELSVRRESLKIATGNSEKANEGKLAVEHELRTWRAEQKQQEKATELNEQTSDPTEPAHDSSSPKGKVPSNNTEAESASNKNKKKKKSSFPSKVVMFFAKKKTHPTK

SEQ ID NO: 278000 - protein, 88 aa, Glycine max
  Clone ID: PAT_MRT3847_93057C.1.pep
MGVPYVIVKGKARLGTVVHQKTAAVLALTEVRSEDKNELQKLVTAVNDGYLESHHKDAARHWGGGIMGAKANARMEKRRKAVESAIKI

SEQ ID NO: 278001 - protein, 97 aa, Glycine max
  Clone ID: PAT_MRT3847_93058C.1.pep
MEPQLESPLGRKDSTGSADSSKPSKHVIETAAPFESVKDAVSKFGGRIDWKSRRTQSLVEERSKLVEDFRKEETAEELENTKKLIEELKTSLEKIEK

SEQ ID NO: 278002 - protein, 84 aa, Glycine max
  unsure (1)..(84): unsure at all Xaa locations
  Clone ID: PAT_MRT3847_93059C.1.pep
WNASNCVCTLQGVTCNSVNFVTEINLSNQTLSGVPPFDSLWKLPFLQKLEFGFEQLNRRRXEDIRNLVNLRYLDLGTIFCPTLP

SEQ ID NO: 278003 - protein, 458 aa, Glycine max
  Clone ID: PAT_MRT3847_9305C.1.pep
MDPNNIHTARMKFQFAENSDGCQHSSSGSYNILPIGLFYLAAHYHAFVSFNMRNSTTDVHGTRPLAVPGGGELPTKLTPTAPTSDTSLLPHQSMENTEGSRSATNGVLPLARKVALITGITGQDGSYLTEFLLDKGYEVHGLIRRSSNFNTQRIDHIYVDPHNAHKARMKLHYADLSDASSLRRWLDTILPDEVYNLAAQSHVAVSFEIPDYTADVVATGALRLLEAVRSHIAASGRSHIRYYQAGSSEMFGATPPPQSETTPFHPRSPYAASKCAAHWYTVNYREAYSLFACNGILFNHESPRRGENFVTRKITRAVGRIKVGLQSKLFLGNLQASRDWGFAGDYVEAMWLMLQQEKPDDYVVATEESHTVEEFLEVAFGYVGLNWRDHVVIDKRYFRPSEVDNLKGDASKAKKVLGWKPKVGFEQLVKMMVDRDIEMAKKEKVLVDAGYIDAQQQP

SEQ ID NO: 278004 - protein, 100 aa, Glycine max
  Clone ID: PAT_MRT3847_93060C.1.pep
HLRFRCATRRALTWVCAPLCLNLHPHTPTTFYNTLPRLGRCCACNLHSTHVTLAPHPQFSRPLLETFINSPPYSFRHAVNSFLPTTAGHPPYLLLLFLYY

SEQ ID NO: 278005 - protein, 143 aa, Glycine max
  Clone ID: PAT_MRT3847_93061C.1.pep
ILPRGYTISSLDALQKVGSLNIQAGTAFVDFEFQEEVNSGKVSATTLNKFSCIALAGVSTEYLIYGFSEGGLDDIRKLDLLLKGLGFTQKKTDSQVRWSLLNTVLLLRRHEAARGKVAEALSMGKSVGSCIDIIENSIDVSDL

SEQ ID NO: 278006 - protein, 95 aa, Glycine max
  unsure (1)..(95): unsure at all Xaa locations
  Clone ID: PAT_MRT3847_93062C.1.pep
LGPKPSVLXGTVVIDGFLSIPQWHISGFVEYINFCHKLCDMLLEVPXGAFASRLLIEASIKHTIKVIIGIYYSITLLAVRTCSQEERLNIFLTSN

SEQ ID NO: 278007 - protein, 55 aa, Glycine max
  unsure (1)..(55): unsure at all Xaa locations
  Clone ID: PAT_MRT3847_93063C.1.pep
TSLEXFFFFFFFFFYMPSMILLKGHKDAAFKSDVKLCNNSHNMTLFYVEYNLGYV

SEQ ID NO: 278008 - protein, 61 aa, Glycine max
  Clone ID: PAT_MRT3847_93064C.1.pep
DSGAIGAVIYILRVDCGLLKGAAVSVKVFISRIDVTSFHPQSPDMPQMMVHLCFCQGIKQK

SEQ ID NO: 278009 - protein, 146 aa, Glycine max
  Clone ID: PAT_MRT3847_93065C.1.pep
RPLPYDADLRFFRSQREGLVSRREKGSSHLNEESEPLRGDVDADSESLNSGGKWNDTSEDGSKEYRSKSSVRLSSAKLTTGAGVVYSSSEEEDVCPTCLEEYTEENPKIVTKCSHHFHLGCIYEWMERSDSCPVCGKVMVFDETTD

SEQ ID NO: 278010 - protein, 94 aa, Glycine max
  Clone ID: PAT_MRT3847_93066C.1.pep
VPLLVWLNLRGCPPLPGGFPFCVFFQPFDPLADPLADPLADPLVHPGISDPFLEAFQLFLLGGLLKLGVIIGISCFLGKMVFRYNFPKHSNPKP

SEQ ID NO: 278011 - protein, 83 aa, Glycine max
  Clone ID: PAT_MRT3847_93067C.1.pep
GITEALHGIIPGATIWKRAPFHGRVITSLGANKSDRKARGSNRGPVITPLGTLCNLFGWLNSPSVFHFLLGLVGYGFTTGPPL

SEQ ID NO: 278012 - protein, 50 aa, Glycine max
  Clone ID: PAT_MRT3847_93068C.1.pep
YMKHEQRIAGTHYLLGARHAWVTYYFKIWGNPITRRFYFIHGIVARGALI

SEQ ID NO: 278013 - protein, 166 aa, Glycine max
  Clone ID: PAT_MRT3847_93069C.1.pep
VEETRIRKMEKQSEKLQVDFYGEIPNSDTPESENSENNNKNIITTIIITSLASAIIYSAPARSTEISVINSWKLAFSATYNKIIPRLYRLITHDTIQLFNNYVSFTTQHGTFIGLIAGVVLNKLPETQDFGQVPTITGSLFFGKFLGPYVVPLSVAYYLFNRNNKV

SEQ ID NO: 278014 - protein, 365 aa, Glycine max
  Clone ID: PAT_MRT3847_9306C.1.pep
MENTEGSGSATNGVLAPPRKVALITGITGQDGSYLTEFLLDKGYEVHGLIRRSSNFNTQRIDHIYVDPHNAHKARMKLHYADLSDASSLRRWLDTILPDEVYNLAAQSHVAVSFEIPDYTADVVATGALRLLEAVRSHISASGRSHIRYYQAGSSEMFGATPPPQSETTPFHPRSPYAASKCAAHWYTVNYREAYSLFACNGILFNHESPRRGENFVTRKITRAVGRIKVGLQSKLFLGNLQASRDWGFAGDYVEAMWLMLQQDKPDDYVVATEESHTVEEFLEVAFGYVGLNWRDHVVIDKRYFRPAEVDNLKGDASKAKKVLGWKPKVGFEQLVKMMVDQDIEMAKKEKVLVDAGYIDAQQQP

SEQ ID NO: 278015 - protein, 128 aa, Glycine max
  unsure (1)..(128): unsure at all Xaa locations
  Clone ID: PAT_MRT3847_93070C.1.pep
VFRCQACNTTXESLGWVKDVFHHXAPPLEGEALMRELDYVILIFHGSKDPLRRKLFCKSLISRKNXEYKYAVKAGCPSMLMFLQTLEVDSSICHSNRLRGMLIASLDACDKTAEAVHDAVRKIVMVTD

SEQ ID NO: 278016 - protein, 92 aa, Glycine max
  unsure (1)..(92): unsure at all Xaa locations
  Clone ID: PAT_MRT3847_93071C.1.pep
MLPKAWLLQQFDSPFFLLSFWRHPRWGFRSVLVFQKGFGLCLARVPGADFSFEGGVSFIPSKEPGAVFFSGWVAPXLLXVXVFXXXXXFWXX

SEQ ID NO: 278017 - protein, 408 aa, Glycine max
  unsure (1)..(408): unsure at all Xaa locations
  Clone ID: PAT_MRT3847_93072C.1.pep
QYSLPSQGGANMIQPNALQSGSSALQHQLKHQQEQQMLQSQQFKQQYQQRQQLMQRQQLLQQQQLHHPAKPQLSSQLQTHQMPQLHQMNDINDIKMRQGMGVKSGVFQQHLTSRPRSTYPHQQMKGSPFPVSSPQLLQATSPQIPQHSSPQVDQQNHLPSLTKVATPLQSANSPFVVPTPSPPLAPSPMPGDSEKPISGVSSISNAANIGYQLTGGAAAPAQSLAIGTPGISASPLLAEFTGPDGAHGNALAPTSGKSTVTEQPIERLIKAVKSMSPKALSSAVSDIGSVVSMNDRIAGSAPGNGSRAAVGEDLVAMTNCRLQARNFITQDGANGTRRMKRYTNATPLXVSCSMNDSIKQXLLSEDCTSRVKKPKIEVNHALLEEIREINHQLIDTAVEIREINHQLM

SEQ ID NO: 278018 - protein, 45 aa, Glycine max
  Clone ID: PAT_MRT3847_93073C.1.pep
CSFPLLEHWLHTLLFEIGLQVRYKHLPALSQYSARCQVQAREMMH

SEQ ID NO: 278019 - protein, 155 aa, Glycine max
  unsure (1)..(155): unsure at all Xaa locations
  Clone ID: PAT_MRT3847_93074C.1.pep
QHNYENNPYAKEFGISIDSKLASVEARVLPAPWLKYHDTGREKEXVPQVGQWNMMNKKVVSGSTVRYWACINFSRSVQESAARGFCQQLVQMCQISGMEFSQDPAIPIHSARPDQVKKALKYVHSAVIDKLDGKELELLIALFPDNNGSLNGDLK

SEQ ID NO: 278020 - protein, 55 aa, Glycine max
  Clone ID: PAT_MRT3847_93075C.1.pep
AFKITLIFPGYNFKPPFFYDFCMKTSTRGDFSKKKKTEGGLLPSLFHKRLTLKGL

SEQ ID NO: 278021 - protein, 151 aa, Glycine max
  Clone ID: PAT_MRT3847_93076C.1.pep
TEERAARRKKKLEEKFNANEAQKVQLHTKLKEKTETEIIRKLRQSFCFKARPLPDFYKERKTSTNETKKDPLTHFETPKDGRKSTPSMADSKTSFPPNRPVLKNSGTKHFLGKSGRTLSHPLTSTSMIIPTHENTSPNIQNGYQTGRNLKY

SEQ ID NO: 278022 - protein, 111 aa, Glycine max
  unsure (1)..(111): unsure at all Xaa locations
  Clone ID: PAT_MRT3847_93077C.1.pep
FPXRPTLPLHPIFDQTFNFLKYILTLQSSSNYKPAHKNPSSYQINTYKSPSYNNPPPYNNLPKHSSITIFNISNNTIDTYNIYIFTFLNHLHTYITISIKSIFIINIFINY

SEQ ID NO: 278023 - protein, 69 aa, Glycine max; identical to SEQ ID NO: 230024
  Clone ID: PAT_MRT3847_93078C.1.pep

SEQ ID NO: 278024 - protein, 48 aa, Glycine max
  unsure (1)..(48): unsure at all Xaa locations
  Clone ID: PAT_MRT3847_93079C.1.pep
VEILEPVDGSQDATIPMSSLPSIDCLSTSYDXPMHMIGNPLTCFRLVT

SEQ ID NO: 278025 - protein, 86 aa, Glycine max
  Clone ID: PAT_MRT3847_9307C.1.pep
YESSRSHDCVQLSKVQFEKSKVFGNIAVNSSSTEPFLYGTCEYTLLNYSQTNLSTTVNLICPGQVSRNCSAIVCVWYVFTSKTCTV

SEQ ID NO: 278026 - protein, 602 aa, Glycine max
  unsure (1)..(602): unsure at all Xaa locations
  Clone ID: PAT_MRT3847_93080C.1.pep
MQLGKWVIYLVLIFSLLSQFSETVAETSSYSTPQPQPPICSEEDRASLLSFKASISQDTTETLSTWTGRDCCDGGWEGVECNPSTGRVNVLQIQRPGRDADATYMKGTLSPSLGNLHFLEVMVISGMKHIXGPIPNSFSNLTHLTQLILEDNSLGGCIPPSLGRLPLLQSLSLSGNHLKGQIPPTLGGLRNLAQLNLARNSLTGPIPLSFKTLINLQYLDLSHNLSXHPIPDFVGDFKNLTYLDLSSNLLTGKIPVSLFSLVNLLDLSLSYNKFAGNIPDQVGNLKSLTSLQLSGNLLTGHIPLSISRLQNLWYLNISRNCLSDPLPAIPTKGIPSLLSIDLSYNNLSLGILPDWIRSKQLKDVHLAGCKLKGDLPHFTRPDSLSSIDLSDNYLVDGISNFFTNMSSLQKVKLSNNQLRFDISEIKLPTELSSIDLHANLLVGSLSTIINDRTSSSLEVIDVSNNFISGHIPEFVEGSSLKVLNLGSNNISGSIPISISNLINLERLDISRNHILGTIPSSLGQLLKLLWLDVSINGLTGQIPSSLSQITGLKHANFRANRLCGEIPQSRPFNIFRPVAYIHNLCLCGKPLQPCKKQWSMGQ

SEQ ID NO: 278027 - protein, 154 aa, Glycine max
  unsure (1)..(154): unsure at all Xaa locations
  Clone ID: PAT_MRT3847_93081C.1.pep
FLKLPRRKIFGKPKTRCWTILPMEWKLVGRQKXLNDWRFIMKKRDELSCQXVGVNPYXMEWTGLAIDNXYKGNYILRSDYASYDGLITKQDLSKIAQMINSLCGGDEKLMREGTHLMVACSSRMGIGKKDICRVXXGIPCVLALTVMSNRMFNE

SEQ ID NO: 278028 - protein, 153 aa, Glycine max
  Clone ID: PAT_MRT3847_93082C.1.pep
MNRREKLSLLNAFFRTRRPFHQSPIVAPFTPPTHVASTSKFHSFPTISHTHFAIRQYPRSFAGGSGALDHTKEVDTINLKFAEAREEIEMALESKDTVYFDEEAECARAAVNEVLGMFEGLLAKLPERERGALQRSMGLKIEQLKAELAQLNE

SEQ ID NO: 278029 - protein, 70 aa, Glycine max
  Clone ID: PAT_MRT3847_93083C.1.pep
VWFRTRYLDFGGCFYILQLGMILRGPICTSHARGFFHRSSWRSQEPDPMKRPYSLFLMFVKIHCLIQWKL

SEQ ID NO: 278030 - protein, 224 aa, Glycine max
  unsure (1)..(224): unsure at all Xaa locations
  Clone ID: PAT_MRT3847_93084C.1.pep
MKREKEKEKGVAVTSPVSGEDSDDKQRPSFPSVRFSSRNASSKYDFVKVKVWLGDNADHYYVLSRFLLSRMLTVTKIPNHVAIKIALELKKLLTDNSLLDVSQSDLEVNLFKLMERRGYGEEYINRYKMMTRFHHQRVPLVILVCGTACVGKSTIATQLAQRLNLPNVLQTDMVYELLRTSTDAPLASTPVWARDFSSSEALITEFCRKCXVXRKGLAGDLKKQ

SEQ ID NO: 278031 - protein, 137 aa, Glycine max
  Clone ID: PAT_MRT3847_93085C.1.pep
SVNEPVTEVGGDSNKNTTDNGKAVDELVTEVGGDSYKDTTDNKKAADELVAEVGGDSNKDTTDNKKAVDELVAEVGGDSNKDTTDDKKAVDESVNEVGGDSNKDTTDNKKAVDGSVTEVGGDSNKDTTDNKMGVKHE

SEQ ID NO: 278032 - protein, 43 aa, Glycine max
  Clone ID: PAT_MRT3847_93086C.1.pep
HRCRSFASSPSSPRLELHQDSFLFLFLVQFSSICEFSSLSSLP

SEQ ID NO: 278033 - protein, 52 aa, Glycine max
  Clone ID: PAT_MRT3847_93087C.1.pep
PQSSMWPAPPFVSRSHNLVTLRCPLLLPLIFFSFRFSFMYGSLNKTGSFSLV

SEQ ID NO: 278034 - protein, 49 aa, Glycine max
  unsure (1)..(49): unsure at all Xaa locations
  Clone ID: PAT_MRT3847_93088C.1.pep
FXXXXFFFFLEAGTIRIIYGYDTRLGRFNQFLGLIKLATKISTGLLYIK

SEQ ID NO: 278035 - protein, 123 aa, Glycine max
  unsure (1)..(123): unsure at all Xaa locations
  Clone ID: PAT_MRT3847_93089C.1.pep
SCPRWVLPGCLACWVLGGGCPLCVGWRCVSALVGAVARAWLRALLWCLPACAXPCVSRFGLXGPRPPPPFPLRLCPAFLAFGFGFGXCWWLPRAPAFAALWPSCVVCSKAGIGPRASLGSKEV

SEQ ID NO: 278036 - protein, 80 aa, Glycine max
  Clone ID: PAT_MRT3847_9308C.1.pep
GVARASRVIAAVEGGVGIFSLAGRAQLEGSCLVSFVVLGGRAGGGGACSGSCGGFRVCGGGGGRLWIPPGWLWCLAAFIR

SEQ ID NO: 278037 - protein, 42 aa, Glycine max
  unsure (1)..(42): unsure at all Xaa locations
  Clone ID: PAT_MRT3847_93090C.1.pep
TEVQISKWLNYSNSHKGGLXTNPTWTESKCVFGLALIMHIQL

SEQ ID NO: 278038 - protein, 85 aa, Glycine max
  Clone ID: PAT_MRT3847_93091C.1.pep
VLGAYSAFPCVFLEGKDCPTKADVKSGCRGSGSIVKVPIYKSLSTPPLWVKIEPEAGSIYLLLGFHNNIAIINVSSEGSVHVVFQ

SEQ ID NO: 278039 - protein, 42 aa, Glycine max
  Clone ID: PAT_MRT3847_93092C.1.pep
FPPWSRQHFLPHISVVLSGSGRPRLLFSFTLHVFAFVCAPKQ

SEQ ID NO: 278040 - protein, 114 aa, Glycine max
  Clone ID: PAT_MRT3847_93093C.1.pep
NPKPWLVAGQILVFSAKIESHGRWWGKFEFSLLGSKALVGGHADFSFCWSPPLNPFVGGGGADPRLPTWSIGSSLSFFSCPLKNQNQLVNPKAWITYFLSMRFGCLWFFYFPWF

SEQ ID NO: 278041 - protein, 95 aa, Glycine max
  unsure (1)..(95): unsure at all Xaa locations
  Clone ID: PAT_MRT3847_93094C.1.pep
LGSFLHWAVQYEDLFPLFLSFFLSFCLIHHSVPPWXSLHHHPHSVTHNYRDALTKFIIFFEGQRSGKLPSNQRMSWRRDSCLSDGSTMHVDLVCG

SEQ ID NO: 278042 - protein, 146 aa, Glycine max
  unsure (1)..(146): unsure at all Xaa locations
  Clone ID: PAT_MRT3847_93095C.1.pep
TRGVNLPSHLLIIXGTEYYDGKXRTYVDFSITDIYANHWSRCDDPQSDQHGKAAILVHEPSKSLYEKFLCEPFPDESRWRHQSHEHITAEIICETIRHKQEAVHYLTWTYLFSTLMDNPANYGXDDAKIEIINTYSSILLQTTIYD

SEQ ID NO: 278043 - protein, 70 aa, Glycine max
  unsure (1)..(70): unsure at all Xaa locations
  Clone ID: PAT_MRT3847_93096C.1.pep
QTILRSLLNCVSRXLNVALDKDGCADYHPNITAEMIAGPLTNIVSLXMAMTXARELTEQAGTTGVQVHSA

SEQ ID NO: 278044 - protein, 120 aa, Glycine max
  unsure (1)..(120): unsure at all Xaa locations
  Clone ID: PAT_MRT3847_93097C.1.pep
LSGQPVNDFSALQSFLKYSHIQYEFLDKHDCGDPSLXRMENECVEIDIKDERFILRHHSQLLLLASNQHTLFTEDLDDYALTTLSLEARXKLYKVRPQTIVHASRVSGVSPADITGLVIV

SEQ ID NO: 278045 - protein, 66 aa, Glycine max
  unsure (1)..(66): unsure at all Xaa locations
  Clone ID: PAT_MRT3847_93098C.1.pep
XVIWNYYRXIVMFLFXSNXKSPTTXYSRXXXSXALEVLXLETPFLDLGXXXXVPLKXSLEDXSGXX

SEQ ID NO: 278046 - protein, 54 aa, Glycine max
  unsure (1)..(54): unsure at all Xaa locations
  Clone ID: PAT_MRT3847_93099C.1.pep
TPTLNLISCIKQILQNFQTLTXVLIIGVNNIYYFFQQKFFGLKIDWITFNKFLF

SEQ ID NO: 278047 - protein, 80 aa, Glycine max
  Clone ID: PAT_MRT3847_9309C.1.pep
SQALCTRRAFQSHHGRFMARTFSGNSVITMKLHLHIINKLSIRLGTLKHQNASKAQCLFILPNSPHPPLIHHRAQVPTGS

SEQ ID NO: 278048 - protein, 96 aa, Glycine max
  unsure (1)..(96): unsure at all Xaa locations
  Clone ID: PAT_MRT3847_930C.1.pep
YELLVKGSXVVLTHGEGVSTPHVRHKGRQPLIECANMTLIFTFPFMSLYPLYPFYIFSFLFLWLTRVFPFAPMYSSIGMRKSDLRSSFLSSDSFLF

SEQ ID NO: 278049 - protein, 46 aa, Glycine max
  Clone ID: PAT_MRT3847_93100C.1.pep
IYLIMYLTLNRQNQPFDSYAYSSKKRTQIIILFPKYLIISKLVQIV

SEQ ID NO: 278050 - protein, 95 aa, Glycine max
  unsure (1)..(95): unsure at all Xaa locations
  Clone ID: PAT_MRT3847_93102C.1.pep
LARVFFRQIVIPTMRRSFLSCCKGVLPKFXSSEWFVDQLRRKKVXQYAAAFVLQKGAVVILGMDGSFNPCQFEFAAGGEMTHLEYFSFIKAEETF

SEQ ID NO: 278051 - protein, 263 aa, Glycine max
  Clone ID: PAT_MRT3847_93103C.1.pep
NSRRRPTRPQESGPDNKQSTLVFPKGNPIPSVKALTIYRGSSFSIDVQYDDVSGLQTPAKISTYTIGPFQSTKNEKAKVKVKVRLNVHGIISVESATLLEEEEEIEVPVYKEPAGENSKMETDEAPADAAAAAATPSTNDNDVSMQDANTKATANAPGAENGTPEAGDKPVQMDTDTKVEAPKKKVKKINIPVVELVYGAMAATDVQKAVEKEFEMALQDRVMEETKDKKNAVEAYVYDMRNKLNDKYQEFVIDSEKGAFTAK

SEQ ID NO: 278052 - protein, 522 aa, Glycine max
  Clone ID: PAT_MRT3847_93104C.1.pep
PISFPGVQYKFRTPHIPPSPIAHVRFVFFFLSVLECAILSPTFKVREFQVNESLPFSISLSWKGSGPDAQDNGSENQQSSLVFPKGNPIPSIKALTFCRAGTFSVDVLYDDASGLQTPAKISTYTIGPFQTTNAEKAKVKVKVRLNLHGIVSVESATLLEEEEIEVPVSKEPAGENTKMETDEAPANVAAPPSTNDNDVNMQDANSKATADAPGSENGTPEAGDKPVQMDTDTKVEAPKKKVKKINIPVVELVYGAMAAADVQKAVEKEFEMALQDRVMEETKDKKNAVEAYVYDTRNKLNDKYQEFVVDSERESFTAKLQEVEDWLYEDGEDETKGVYIAKLEELKKQGDPIEERYKEYMERGTVIDQLVYCINSYREAAMSNDPKFDHIDINEKQKVLNECVEAENWLREKKQQQDSLPKYVTPVLLSADIRKKAEAVDRFCKPIMMKPKPPPPKPATPEAPATPPPQGGEQPQQQQQQPPEENPNASTNEKAGDNANPAPPPASAEPMETDKPENTGSA

SEQ ID NO: 278053 - protein, 65 aa, Glycine max
  Clone ID: PAT_MRT3847_93105C.1.pep
KLIFSNDMAFVCTICLLRSHRSASSYSSFPYCVCELEFCKIRSLSASTSDLRCLSHALRWSTSTT

SEQ ID NO: 278054 - protein, 41 aa, Glycine max
  Clone ID: PAT_MRT3847_93106C.1.pep
LLEDLSDTAYIIHFCCCDWMYRPFCWAGEIPWSSLGYPPFF

SEQ ID NO: 278055 - protein, 81 aa, Glycine max
  Clone ID: PAT_MRT3847_93107C.1.pep
RSLGWLNGSHTPGLLPPRPKYNAITGIESRPLFDKVHDPSEFLMAGAKGIEVSYSSPVFYFFYLTAVTVGSYYFLVFFVLV

SEQ ID NO: 278056 - protein, 65 aa, Glycine max
  Clone ID: PAT_MRT3847_93108C.1.pep
LLPLGTEVSMLLQSLLLLLDLIRHHSQSLVSPQREMLDPLPVSQGHWCLFLQSPKDNVGESPPLR

SEQ ID NO: 278057 - protein, 84 aa, Glycine max
  Clone ID: PAT_MRT3847_93109C.1.pep
KKGKSGLPFGSKSTFFLPPSSSSPSWGSFFYPVLDPRSRPRELLIHGLLHSPECAVHVFFSSCPGGQTYQIKTKLKKKKKKKKK

SEQ ID NO: 278058 - protein, 75 aa, Glycine max
  unsure (1)..(75): unsure at all Xaa locations
  Clone ID: PAT_MRT3847_9310C.1.pep
SRNCRCLSLESSLLSDVILLNVSVSTVEVECRCSIWIGGSGMDLRSKARTLPGPVSDPSEXPKWNYDGSSTGQAP

SEQ ID NO: 278059 - protein, 149 aa, Glycine max
  Clone ID: PAT_MRT3847_93110C.1.pep
MGVQGTMEYLSDLLSTKKKKKKKQVQTVALKIRMDCEGCARKVKHVLFGVKGAKSVEVDLKQQKATVTGYVEPKKVLKAAQSTKKKVELWPYVPYSMVANPYISQAYDKKAPPNMVRKVADTANISETTVDDRYIQIFSDENPNACSIM

SEQ ID NO: 278060 - protein, 298 aa, Glycine max
  Clone ID: PAT_MRT3847_93111C.1.pep
MKTTAEVVSSHCLVVAECSQSSPTQLSAMEPQILNLGCMHYRRRCKIRAPCCDEVFDCRHCHNEAKNSEEVDAVDRHDVPRHEIKKVICSLCDVEQDVQQYCINCGICMGKYFCTICKFFDDDISKNQYHCDECGICRTGGKDNFFHCNRCGCCYSKVMEKGHRCVEGAMHHNCPVCFEYLFDTVREISVLPCAHTIHLDCVKEMEKHQRYSCPVCSKSICDMSSVWEKLDELIASTPMPETYKNKMVWILCNDCGVNSHVQFHIVAHKCLSCNSYNTRQIQGVPATSSSSRVTEMVR

SEQ ID NO: 278061 - protein, 117 aa, Glycine max
  unsure (1)..(117): unsure at all Xaa locations
  Clone ID: PAT_MRT3847_93112C.1.pep
MASSMIFSPADTTVNRAGAGMAGPFTGLKYMAGFPTXRKTNNDLTWIARHGGKRPCMHVWPTIGKKKFETLSYLPDLDDAXLAKEGQYPLKKGWDPLLGITLEHRFAYPEHKKAPGY

SEQ ID NO: 278062 - protein, 63 aa, Glycine max
  Clone ID: PAT_MRT3847_93113C.1.pep
LTETEEEITLVCLSSFANPAQKCCQKGIMNTYWFLIGSTLDAATYPKRVARTGVLQGEAAKAN

SEQ ID NO: 278063 - protein, 48 aa, Glycine max
  Clone ID: PAT_MRT3847_93114C.1.pep
LSGAKHAFSTEPVLRAKRLRHAKSTSSKFQYVLLDFTLLIKHHKFINF

SEQ ID NO: 278064 - protein, 104 aa, Glycine max
  Clone ID: PAT_MRT3847_93115C.1.pep
GATVEVRFTEADFPFGQAQSSLAFSFVKWMADRALGATVQFPISVGTGYKAAVRAGMINKLIVQITVITSSSVQHQIAHDAIHAIAKAIFENFWLGVSENYSIH

SEQ ID NO: 278065 - protein, 100 aa, Glycine max
  Clone ID: PAT_MRT3847_93116C.1.pep
SICPVEGRDNKFAPLDFQTPKRFDNHYFINILEGKGLLGSDNVLISHDLDGKITEQVWAYASNEKLFFASFAKSMIKMGNINVLTGNEGEIRRNCRFVNA

SEQ ID NO: 278066 - protein, 42 aa, Glycine max
  Clone ID: PAT_MRT3847_93117C.1.pep
ASSILIILRLPLTIDIIRRPSPIPILVNSIHSFSFLCALHIH

SEQ ID NO: 278067 - protein, 105 aa, Glycine max
  unsure (1)..(105): unsure at all Xaa locations
  Clone ID: PAT_MRT3847_93118C.1.pep
TRPFRSRQAPHTGGIGFLRGAEESEQMRAISHMQGVLCXTRAMMIGPPFNKAPATQSLPLGPAYLDSQPQGLPDENVPNPAAIFVGDLDPNVTRGHTGREAKRAG

SEQ ID NO: 278068 - protein, 501 aa, Glycine max
  Clone ID: PAT_MRT3847_93119C.1.pep
GSRAATTHFGYDSEAEERRLKKLALRAKFDSQFDDDSGSSEEDTGNENDSSRFGSRANESSYFDKLKEEIELQKQMNIAELNDLDEATRLEIEGFRTGTYLRLEIHDVPCEMVEYFDPYHPILVGGIGIGEENVGYMQARLKRHRWHKKVLKTRDPIIVSVGWRRYQTTPIYAIEDSNGRDRMLKYTPEHMHCLAMFWGPLAPPNTGVVAFQNLSNNQATFRITATAVVLEFNHAARIVKKIKLVGYPCKIFKKTALIKDMFTSDLEVARFEGAAIRTVSGIRGQVKKAAKEEIGNQAKRKGGQTKEGIARCTFEDKILMSDIVFLRAWTQVEVPQFYNPLTTALQPRDMTWKGMKTVAELRREHNLAIPVNKDSLYKKIERKPRKFNPVVIPKSLQASLPFASKPKDISKRKKPLLEERRARGVVMEPRERKVHTLVQHLQLIDREKMKKRKLKEENKRKALEAESAKEELLLRKRRREERRDKYRKEDKQNKKIRRAEV

SEQ ID NO: 278069 - protein, 235 aa, Glycine max
  Clone ID: PAT_MRT3847_9311C.1.pep
MSYLQSQVYKERKFEEESEEVTLDGSVDFHGRPAIRAKSGRWVAAIIILLNQALATLAFFGIGVNLVLFLTRVVGQNNADAANNVSKWTGTVYIFSLVGAFLSDSYWGRYKTCAVFQVIFVIGLVSLSLSSYLSLIRPKGCGNETIPCGKHSSLEMGMFYLSIYLIAFGNGGYQPNIATFGADQFDEEHSKEGYSKVAFFSYFYLALNLGSLFSNTILGYFEDEGLWALGFWVSA

SEQ ID NO: 278070 - protein, 188 aa, Glycine max
  unsure (1)..(188): unsure at all Xaa locations
  Clone ID: PAT_MRT3847_93120C.1.pep
KTKTIINVPKTNNVAKEKKVVRGKGARSRPGGKGGAIKQLILMLGAIAAAVGAAATIGTSAHTLTFFTQFSLFAAFYYFFTTYXGFHLFLSFRFSIVVIXRPHAVGPRLFLIILDTVFLAVAPALCLFTLATVFVALAAASGSFGLAICNQFXNFCAQTNWAVVSSFVAVFVLLILGVMSALSLGKRL

SEQ ID NO: 278071 - protein, 61 aa, Glycine max
  Clone ID: PAT_MRT3847_93121C.1.pep
KFLMRAEIVIEKLCSVTFNLRAIKQVVTVPQGQKLVITKMKNIKCRSKIFKAKVEHQPIAQ

SEQ ID NO: 278072 - protein, 108 aa, Glycine max
  Clone ID: PAT_MRT3847_93122C.1.pep
SPVGVIVPPVCAALRRLGMGLCVFVKEAITPAWIAPLLSTRTRTTFGTLPLRITSSSLDSGEPFNGGNHQPFLISKSCFRKVDLLKRKNKGIPHPFLYGSLCGFVFLY

SEQ ID NO: 278073 - protein, 150 aa, Glycine max
  unsure (1)..(150): unsure at all Xaa locations
  Clone ID: PAT_MRT3847_93123C.1.pep
KFRREGLHERFCALSSVLEPGSPFGTNKPPILDYAIQVLSPLXTQAPGFQKTNGNFLEGIKCFKAEKNLLPEEKLFFXTDKERVCNPFKAFPVAPPGFLAPPVVFGSPAYQTGVNKMAVFPHYGCLPMWQFFPPFVRDPSPGHELRPPPA

SEQ ID NO: 278074 - protein, 67 aa, Glycine max
  Clone ID: PAT_MRT3847_93124C.1.pep
FNFSCPIKKFLTWKAGVVKLGSFKPPALEHPLCYITPLCGVFSHRNPFCFFLTPVGVGRPPNFSPVP

SEQ ID NO: 278075 - protein, 113 aa, Glycine max
  unsure (1)..(113): unsure at all Xaa locations
  Clone ID: PAT_MRT3847_93125C.1.pep
YLFKVVLIRDSGVGKFKLISRFNMNEFNVEFKSTIGRVSXTHRTLNVXSIVIKAHIWDTAGHKRYRAITRVYYRGATGALIVFDVPRHAXLENGDRXLKQLLNHIDVNIVVML

SEQ ID NO: 278076 - protein, 51 aa, Glycine max
  Clone ID: PAT_MRT3847_93126C.1.pep
TVHVQMELEILSVTNSCEKNILMLIKMRSEICYGEAQTNVCKCKWKARVLL

SEQ ID NO: 278077 - protein, 99 aa, Glycine max
  unsure (1)..(99): unsure at all Xaa locations
  Clone ID: PAT_MRT3847_93127C.1.pep
KPXKDPXPPXPXXKNKTPPPPGXKDKGPPPPPXKKADKXPXXPPPGXKDKGXPPPDKNXXPPPPPXKDPXXPPPPADDYKTPPPPPKKPHKDPXXPPPH

SEQ ID NO: 278078 - protein, 143 aa, Glycine max
  Clone ID: PAT_MRT3847_93128C.1.pep
AALVFLLPLSAALSSFIFSLLSVVNALATFLISPLGNSLASCLANSGSQSAYCGFLLCAVKSGTSVFDNVVNCSLVAGLNRGIAERSTACVGSPEASCTTIVLFLPRLRLRSMSPKRSSAYYRSEIIFRQAQAGALGGLVQNT

SEQ ID NO: 278079 - protein, 256 aa, Glycine max
  Clone ID: PAT_MRT3847_93129C.1.pep
MEAGYNPRTVEEVFRDFKGRRAALIKALTTDVEEFYQQCDPEKENLCLYGFPSEQWEVNLPAEEVPPELPEPALGINFARDGMQEKDWLSLVAVHSDAWLLAVAFYFGARFGFDKADRKRLFNMINDLPTIFEVVTGMAKKQGKEKSSVSNHSSTKSKSNSKRGSESKYTKAMQSKDEDDEGGAGLGLGLEDEDEEEHGDTLCGACGESYAADEFWICCDICEKWFHGKCVKITPARAEHIKQYKCPSCSNKRARP

SEQ ID NO: 278080 - protein, 128 aa, Glycine max
  Clone ID: PAT_MRT3847_9312C.1.pep
QNQSLLDFKNLPISSYFLVFDFLRERKSLSVLATDFGESFSFPLLVYLLNTLLFDIGLCVRFKLFLFLYQVFCLISSSSLVNILDLWLPLLLSGIRTFPGRHSPIFVLFFNSILLTDTICRSKWFYLK

SEQ ID NO: 278081 - protein, 104 aa, Glycine max
  Clone ID: PAT_MRT3847_93130C.1.pep
PRVRPRVRPRVRSTDFREKMGTLQRQLMNVRFSGSAMKLTGEIEEEIVNVSIDDVVLQLKNGKDEEFAVALLRLKEFMSSERLDGGLIDEESNSFHSFQSSRFM

SEQ ID NO: 278082 - protein, 251 aa, Glycine max
  Clone ID: PAT_MRT3847_93131C.1.pep
MDAGYNPRTVEEVFRDFKGRRAALIKALTTDVEEFYQQCDPEKENLCLYGFPSEHWEVNLPAEEVPPELPEPALGINFARDGMQEKDWLSLVAVHSDAWLLAVAFYFGARFGFDKADRKRLFNMINDLPTIFEVVTGMAKKQGKEKSSVSNHSSTKSKSNSKRGSESKYTKAMQSKDEDDEGVGVEEEDEDEHGETLCGACGESYAADEFWICCDICEKWFHGKCVKITPARAEHIKQYKCPSCSNKRARP

SEQ ID NO: 278083 - protein, 69 aa, Glycine max
  Clone ID: PAT_MRT3847_93132C.1.pep
TWHMGYIRLIPIPIASEPQVPKSTSALGVGCIKLNHIAHSKLALKKDSMLMQNGTSLYYYSLTIFCLRA

SEQ ID NO: 278084 - protein, 50 aa, Glycine max
  Clone ID: PAT_MRT3847_93133C.1.pep
PYIGLGLGGNKNFIIFYGNNKKKKKKKKKKKKRGGPLQKNPAYVRVPCTS

SEQ ID NO: 278085 - protein, 80 aa, Glycine max
  unsure (1)..(80): unsure at all Xaa locations
  Clone ID: PAT_MRT3847_93134C.1.pep
TDISCKTLSEPTITLEETSSDTTVTGXAKTHHMVRIPADQHRFIIVEEQLVDYRSIDDYNIQNECTLDLDLQLISGCIFS

SEQ ID NO: 278086 - protein, 76 aa, Glycine max
  Clone ID: PAT_MRT3847_93135C.1.pep
YYKTGHRLGSMTHYTYNIYRPASIISYILWCDCYPLLLYVSIAFFKNGIPLRCALSSRPGFLFLFLSNMSWPIVPC

SEQ ID NO: 278087 - protein, 75 aa, Glycine max
  Clone ID: PAT_MRT3847_93136C.1.pep
VLCYILIISIILPFICMVLSSGLSCMLTGSSRAYSVAYVKRSASAIVVACAPDVVLDRRSIESIASVKNLGLYAC

SEQ ID NO: 278088 - protein, 124 aa, Glycine max
  unsure (1)..(124): unsure at all Xaa locations
  Clone ID: PAT_MRT3847_93137C.1.pep
VDGLEGAAHIGELKSGVYRPLPTKTNLEETPKEWXLDLPCDKIPSGLTTTDERLTGTQHEGYHPFLDGIEKYATPMMPLDEEILSMAVQYMAEEWIDCVDEEDTFEEDGLSAALNGVDGLDYIE

SEQ ID NO: 278089 - protein, 44 aa, Glycine max
  Clone ID: PAT_MRT3847_93138C.1.pep
ITKSYIYPYYSIHYIPVFLNLHCDLCSKILMIRVFELLNHQKCN

SEQ ID NO: 278090 - protein, 54 aa, Glycine max
  Clone ID: PAT_MRT3847_93139C.1.pep
IMLPAIISQKVSVSIISANSRCMLINPIGMCLPDKRLTQRISIVPSKPSVSTIF

SEQ ID NO: 278091 - protein, 59 aa, Glycine max
  Clone ID: PAT_MRT3847_9313C.1.pep
QALKDITANPTLPTTRTLHHSINVRSNHIRCDRRSRDPLQTIFMTRSFFDLNHSAIRAD

SEQ ID NO: 278092 - protein, 137 aa, Glycine max
  Clone ID: PAT_MRT3847_93140C.1.pep
MGDAEEENACIAEVFDFKEKKKKNKKKTAKKRVTFAENEANSPTVVNNDGNEDSAAAASGVRISLFDFSVENFFRDMDTIARLCGKENGAALDQSEVQRLSSSVTFLREWRDFKYPSRSIKFAYGLESSDCSEGRNI

SEQ ID NO: 278093 - protein, 83 aa, Glycine max
  Clone ID: PAT_MRT3847_93141C.1.pep
LGFSQRLFFFLFALLCGVSFCSQMLLALPYFLAFASVFAVALSGCKDFQLLPLFLLSSLSCLPLSIIVVMMSSIMGVPSVKIH

SEQ ID NO: 278094 - protein, 44 aa, Glycine max
  Clone ID: PAT_MRT3847_93142C.1.pep
AKTIRFDFLFSIKKKKKREKEKNKKKKKKKKKKKKKKKKRGGVF

SEQ ID NO: 278095 - protein, 86 aa, Glycine max
  unsure (1)..(86): unsure at all Xaa locations
  Clone ID: PAT_MRT3847_93143C.1.pep
FDMPEDEFSAADIKAIWCKAGXLVVRERRMKVAHADFKSAEDKVLFKKKKGVPVGLYMSNTMCYELRTFCHYINVRAMRGNDNPFV

SEQ ID NO: 278096 - protein, 70 aa, Glycine max
  Clone ID: PAT_MRT3847_93144C.1.pep
SYCVLRACFLEYNPVMALMISSLELGISTVVVANPQGSRWFMTGGFFRIGFSMFALLGEFRRSVHPFQCN

SEQ ID NO: 278097 - protein, 114 aa, Glycine max
  Clone ID: PAT_MRT3847_93145C.1.pep
MERYPRDLLQGFSLSGVTTVRDGNNNNNNINNNMMHQHHHHHVLHHHHEQQQQQHEVDDEEVELNLGLSLGGRFGVDKNAKKKKLLRSSSVVGTMPLFREDDAVAPRRNSRAKT

SEQ ID NO: 278098 - protein, 59 aa, Glycine max
  unsure (1)..(59): unsure at all Xaa locations
  Clone ID: PAT_MRT3847_93146C.1.pep
SGSLSRXYQXFXLSXXDHCICWSXXVLXVGCLISSLTATSAQHXSVTLLXXQVXSXNXL

SEQ ID NO: 278099 - protein, 182 aa, Glycine max
  unsure (1)..(182): unsure at all Xaa locations
  Clone ID: PAT_MRT3847_93147C.1.pep
YRPVAGXXAXXGVMXYXXXKYMDAWXSFENAIXXLRASGEKKSAFFGVVLNQMGLACVQLYKIGDAAKHFEEAKEILERECGTYHSDTLGVYSNLAATYDALGRVEDAIEILEYILKMREEKLGTANPDVDEEKKRLCELLXKAGRVRKGKGKKSLENLIDSNSLKMKKEGKKRWAAFGLRT

SEQ ID NO: 278100 - protein, 64 aa, Glycine max
  Clone ID: PAT_MRT3847_93148C.1.pep
LKLLTFSFFENRKSPRLITAKSLCLCRRDCLDICRRLLEFENALLPRLTFGALSISFSQLRDKK

SEQ ID NO: 278101 - protein, 70 aa, Glycine max
  Clone ID: PAT_MRT3847_93149C.1.pep
ARLWLTDSSVSEVVTFDVSQKLLVDMRLPRHDSAFLLQADNFRRAQIETCLAAQRCEDFPDTREAVRRGV

SEQ ID NO: 278102 - protein, 95 aa, Glycine max
  unsure (1)..(95): unsure at all Xaa locations
  Clone ID: PAT_MRT3847_9314C.1.pep
MTDPHCRSKRSYLTITWALVQMSASVIFSGDNKLTEKTISTCRDLDILSVYYTIATQLRKFLPEYIRXAYEYLVVYILPSFITAELNIAEFENIH

SEQ ID NO: 278103 - protein, 96 aa, Glycine max
  Clone ID: PAT_MRT3847_93150C.1.pep
DKEMVNMHFGYLVTCFPSYPNHMMSFHRLPSQFHFQNEQTCSFSEYMWLAKVKPKLHSFQTYPPYEGSLTNFFHIVNRVIFSILCFGDTAAWCVLK

SEQ ID NO: 278104 - protein, 113 aa, Glycine max
  Clone ID: PAT_MRT3847_93151C.1.pep
KRAASSRSPTRASNKITPKRLNSVHFARQSRNPLTQHPLKPLRTNPLFYTWRSAEGEILKCEGETLERGFGAEGARDPRNGAFREVLEEPGLEFGAQLRERGGEREIKRFALV

SEQ ID NO: 278105 - protein, 68 aa, Glycine max
  Clone ID: PAT_MRT3847_93152C.1.pep
VLEIFRTPLVPPRVVCCYTSRIALGSLQYYGVGIAVMIGFMSCCPSHECISGKIVCFRDLWPVGLRLP

SEQ ID NO: 278106 - protein, 197 aa, Glycine max
  Clone ID: PAT_MRT3847_93153C.1.pep
MTDSDANHNDPSLATDTDAPNDAEDEVKLRSRDQRLGPAVLECKQALLCRIAKSSSPPPKTIPAADECFYVKDADYESGTVSMGSDLRKKLDIHVKGDVVAPVLSFSACNLPDKLLHNIEAAGYEMPTPVQMQAIPAALTGKSMLVLADTGSGKSASFLIPIVSRCVIHRRQYFSSKKKPLAMVLTPTRELCIQVEE

SEQ ID NO: 278107 - protein, 166 aa, Glycine max
  Clone ID: PAT_MRT3847_93154C.1.pep
MEHKVATTTEGQSIRCKAAICRKAGEPLCIEEIIVAPPMPGEARIRIICSSLCQTDISFRNMQDHPAIYPRILGHEAIGVVESVGEDVTEVTKGDVVVPIFLPDCGECIDCKSSKSNLCTNFPFKVSPWMPRDATTRFTGQNGEIIYHFWINLYQISNVHHSSSRI

SEQ ID NO: 278108 - protein, 46 aa, Glycine max
  Clone ID: PAT_MRT3847_93155C.1.pep
QKVITCLTKVRFGRIINSKTLGIEQRMVSRNSNVHYLSPRKSDSGA

SEQ ID NO: 278109 - protein, 53 aa, Glycine max
  Clone ID: PAT_MRT3847_93156C.1.pep
YNSAAAYAHHPLAFNTYTHHSFLTLILFLFNTNFFQMGLIPILILHKNLFRTH

SEQ ID NO: 278110 - protein, 159 aa, Glycine max
  Clone ID: PAT_MRT3847_93157C.1.pep
MSKAVSESTDIRVYDVFLSFRGEDTRRSFTGNLYNCLEKRGIHTFIGDYDFESGEEIKASLSEAIGHSRVFVIVFSENYASSSWCLDGLVRILDFTEDNHRPVIPVFFDVEPSHVRHQKGIYGEALAMHERRLNPESYKVMKWRNALRQAANLSGYAFN

SEQ ID NO: 278111 - protein, 222 aa, Glycine max
  unsure (1)..(222): unsure at all Xaa locations
  Clone ID: PAT_MRT3847_93158C.1.pep
MGDFNLALVIVAIVVCVIVFLFNVYLLVNFQHPDDVNQAYFPKFVVVLGLSVAAISILMLPADVANRQACRHAIYNGACNLTLPMKDLWLAIYILDAVLVFFVIPFAMFYYEGDQDKSVGKRIKSALLWMVTTAIVCALVLGILYGLIGKVDFTVRHLSSSTSQFPSTWDFNSGQQCIGNTHQCSAFTASPSSEKTWTMRTTFPEYVVALATIXGSVLFAIF

SEQ ID NO: 278112 - protein, 36 aa, Glycine max
  Clone ID: PAT_MRT3847_93159C.1.pep
NMGRPTLLTQLFNYYPSTLCYTNTILLSSIQNPSTY

SEQ ID NO: 278113 - protein, 54 aa, Glycine max
  unsure (1)..(54): unsure at all Xaa locations
  Clone ID: PAT_MRT3847_9315C.1.pep
MRISEKKRVKERREIEESTHEVLYQIGEXGSTNPRFHQLELEIKQRTEKETEEV

SEQ ID NO: 278114 - protein, 88 aa, Glycine max
  Clone ID: PAT_MRT3847_93160C.1.pep
MKLEFANVLLLCLVLSSSFLEISMAGSPFCDSKCAQRCAKAGVQDRCLRFCGICCEKCNCVPSGTYGNKDECPCYRDMKNSKGKDKCP

SEQ ID NO: 278115 - protein, 57 aa, Glycine max
  Clone ID: PAT_MRT3847_93161C.1.pep
HILYSLMFGPDLCGTDTKKLHVILSYHGQNYPIKKDLQCETDRLTHFYTFILRPDAT

SEQ ID NO: 278116 - protein, 169 aa, Glycine max
  unsure (1)..(169): unsure at all Xaa locations
  Clone ID: PAT_MRT3847_93162C.1.pep
MRALVVLDLLATMSYSRRSRYSPSSSPMLHXKLYCKSASRPLSISPSTYRSRSLSRDAGNPXHTINHVTCTASYDTSTTELXKHFAAERKATDVHLRADPWTKECRRHAYVTKDTLEEAERRAKALNRCWLRRRDITCEKAKRQRDRTPTPGRYVTLRTMNARRHSTRD

SEQ ID NO: 278117 - protein, 98 aa, Glycine max
  Clone ID: PAT_MRT3847_93163C.1.pep
HPLVRQNGGLKILLSFSIGAGERDWEFLLLRNSREHELWKNPSRTSNLLHFLVTQPDPSFSAMLCVRGIINLKMTSFLLLNCRILLLLPQRGEDLCPV

SEQ ID NO: 278118 - protein, 60 aa, Glycine max
  Clone ID: PAT_MRT3847_93164C.1.pep
YELIVVTYLIVSVWTHGSLAVDDLLDIILATSMTDGSLRLRNPYRDRRSRILHYIDRERR

SEQ ID NO: 278119 - protein, 54 aa, Glycine max
  Clone ID: PAT_MRT3847_93165C.1.pep
YTTNWNKAWMVTLFKISHTHPLASELHRHTAGTKLIVANMRQNRCRGVVGPTSV

SEQ ID NO: 278120 - protein, 174 aa, Glycine max
  unsure (1)..(174): unsure at all Xaa locations
  Clone ID: PAT_MRT3847_93166C.1.pep
MSARLMKKVLNEQHHLPQHVSGKEEEEEENDSEPITRSSINPFDLLNDNDSEPEDQGDELMSTNEILASYDDEEESSSLKPTAEVSTSNPKSKKKKKKKNKDSAVVNKTGEDKELDLILENLSLNVNSSAEQPVSTKDKNKSVKQQAASILQVDXKCLNAENELRRIFGSKVVK

SEQ ID NO: 278121 - protein, 103 aa, Glycine max
  unsure (1)..(103): unsure at all Xaa locations
  Clone ID: PAT_MRT3847_93167C.1.pep
ITFPICIFPATISAGFDAGTLASAVTCPLGVPKTRRQIEKDPERALKMTTRTTIXEIWRDGGLRGLFTGVGPRVGRAGPSVGIVVSFYEVVKYVLQLRHPTSS

SEQ ID NO: 278122 - protein, 412 aa, Glycine max
  unsure (1)..(412): unsure at all Xaa locations
  Clone ID: PAT_MRT3847_93168C.1.pep
LDYGFASESNLSDRNSDVFFCNFHLILIILFDFKILRRKEGGEVRSVMASERECFDLSGPLHLTYVDWDNAYHRKSVAASLVQGVYVLEKDRQERREGPDALALPWWAFFHFKLFCSLVDDVDSSIFGAIYEFKPPSSMCNDTLHRSPRYVIAFRGTITKADSVSRDIKLGIHFVRNGLHQTSRAEIAIQAVRNMVATVGASNIWLAGHSLGSAMAMLTGKTMAKTGIFIESFLFNPPYVSAPIERIKDKKLKHGLRFAGSVVTAGLTIAMQAKQKKGLSFDPSXLSLPGPSLFVNPSDHICSEYVAALAAWVPGLFVNPSDHICSEYIGYFEHRRKMDEIGAGVIERLATQNSLGGLLMSAFGKESEPLHLIPSASLTVNVTPSRDFKEAHGIHQWWKPDLQLERKLYNYK

SEQ ID NO: 278123 - protein, 71 aa, Glycine max
  Clone ID: PAT_MRT3847_93169C.1.pep
SSEQVARLKALREFLDASGYLDAMRRRMAGDASTRSYARLLRDDEIVILMNFPQRPDGAALYNGKSYSAGK

SEQ ID NO: 278124 - protein, 164 aa, Glycine max
  unsure (1)..(164): unsure at all Xaa locations
  Clone ID: PAT_MRT3847_9316C.1.pep
IDRPHGDIIGGTFWTATPMQDVQVTIDWFISSQQCDIRTYCVXNPQNPFVLNRRMGKLTFPQGTSRSVKRMPLSIGGGAGAKNSILMNMPNAVLSMWTYFVGDLIFEVSKMTSYYIKCTDYIFIAFGNSVDDTIHFEGFFSQAGVYLERIHDKDLLKFLQEEFF

SEQ ID NO: 278125 - protein, 32 aa, Glycine max
  Clone ID: PAT_MRT3847_93170C.1.pep
PPAPPPPPPPPPPPPPPPPPKEGGRHTVMTGN

SEQ ID NO: 278126 - protein, 87 aa, Glycine max
  Clone ID: PAT_MRT3847_93171C.1.pep
PRSFLHTWFLKPHCNPSFVAFKHMPLLITGEHVAAVNVLVTHTIIGNTIQMPLLCIAVALCLYVRRVNSSHSHWGMHFGVRGCALTA

SEQ ID NO: 278127 - protein, 70 aa, Glycine max
  Clone ID: PAT_MRT3847_93172C.1.pep
KATFWGGLNGRKHYLSYNYICKTPITTISIEHLKLTYHLFQCLKKLRYTLLPKKTLPFGIPNTPPFIYHI

SEQ ID NO: 278128 - protein, 93 aa, Glycine max
  Clone ID: PAT_MRT3847_93173C.1.pep
MELDPKSLEDFFNLFLPIQTSHSRTRGFFSIFPSVNPPHPFSHSPPLCAVIFSFNGKWQERGGHTSFSDGILKLVGASVPCCRGRCGIEKKKK

SEQ ID NO: 278129 - protein, 340 aa, Glycine max
  Clone ID: PAT_MRT3847_93174C.1.pep
MGMDYYGILEVDRNASDEELKRAYRKLAMKWHPDKNPTNKKEAEIQFKQISESYEVLSDPQKRAIFDRYGEGGLNGGMQTPDEGVASFFRTGDGPTAFRFNPRNANNIFAEVFGCSSPFGGMGRGFGCGGSGRGRGMGMGGGSWVSRSFGGMFGNDMFREGRSMNQGPRRKAPPIENTLLCSLEELYKGSTRKMKISREITHASGRIFLVEEILNIEIHPGWKKGTKITFPEKGNEQPNVIAADLVFIIDEKPHSVFTRDGYDLVVTQKISLKEAEALTGYTIQLTTLDGRGLNIIINNVTDPDYEEVVTGEGMPISKDPSKKGNLRIKFNIEIPDIVGA

SEQ ID NO: 278130 - protein, 53 aa, Glycine max
  Clone ID: PAT_MRT3847_93175C.1.pep
IKEYTIQVVGAKRTFILNERRFNLRLHYIGGTSYWKTTKESVAERLAKFLKLV

SEQ ID NO: 278131 - protein, 71 aa, Glycine max
  Clone ID: PAT_MRT3847_93176C.1.pep
NSHRLDKLYIFTVNFSTACLGGGDSNSTSLPPPFSLHHLANLITLLTLPGALTLSMSCETLATCIASPQRV

SEQ ID NO: 278132 - protein, 91 aa, Glycine max
  Clone ID: PAT_MRT3847_93177C.1.pep
LYLLKKLRFKRIFYSYLYYFILKLFMELFTYAIYIIQTKFIKKIISTISFSFSLTFSIILTLDFVRWTSKMVFDPSLHQSYCIIFMLGIRK

SEQ ID NO: 278133 - protein, 53 aa, Glycine max
  Clone ID: PAT_MRT3847_93178C.1.pep
VVLPRNAKSRPLLMSEHSPSSAHYELQFVSQDPSYVFVTCLFLRTYHIICPKR

SEQ ID NO: 278134 - protein, 128 aa, Glycine max
  Clone ID: PAT_MRT3847_93179C.1.pep
HHGIAILFDAGVRVVGSYNPAGLVAAWGDYPAIRFFTAYPIGNSALIMRDPFPRPLCMLRVRALTLSACTQHVCWGCSCLATLSQHHQCSWAPGVQASTSRATVDRSLLHTSGYVLGAWPLPSPTAGP

SEQ ID NO: 278135 - protein, 147 aa, Glycine max
  unsure (1)..(147): unsure at all Xaa locations
  Clone ID: PAT_MRT3847_9317C.1.pep
PTRPNFLTEGNFRASVDLHRTHRIKGMIKMVATVGIPENTGIALACAMNSSFRGRASSDIYTICFQDCELWNPGCTKAMTFSFNPNPCYDAWSLEFLNRTGSYCDIICVTXGWTATPMQDVQVSIYCVISFXEIVPRTYWVLIPKTF

SEQ ID NO: 278136 - protein, 239 aa, Glycine max
  Clone ID: PAT_MRT3847_93180C.1.pep
EQEVTYDRDSFSSFLVQVPWSDTKLYSQLAFLCNMAYVIPQIKAKDLRRYYSLQFITSSLEKKAEVAKLKVQLNQDSTCVPVDDSVASQDVSKKTRDSIKKPQIKLAYDIAASAASYVQLRAKDLLHRAAKSRDTQQTENEDSNGRGDSPREELESTSRGYKSEVAAYVAASTMTAVVAAGEKEKQEAANDLQSLHSSPCEWFVCDDPGNYTRCFVIQGSDSLASWQANLFFEPTKFER

SEQ ID NO: 278137 - protein, 317 aa, Glycine max
  Clone ID: PAT_MRT3847_93181C.1.pep
EEVVEDNKPPLPSFRRLLALNIPEWKQACLGCLNAVLFGAIQPVYAFARRSVISVYFLPDHNEIKKKTMIYSLCFLGLAVFSLVVNILQHYNFAYIGEYLTKRIRERMFSKILTFEVGWFDQDENSTGAVCSRLAKEANVVRSLVGDRMALVVQTISAVVIAFTMGLIIAWRLAIVMIAVQPIIIACFYTRRVLLKSMSSKAIKAQDESSKIAVEAVSNLRTITAFSSQDRILKMLEKAQEGPSRESIRQSWFAGIGLACSQSLTFCTWALDFWYGGKLVFQGFINAKALFETFMILVSTGRVIADAGSMTNDLAKG

SEQ ID NO: 278138 - protein, 177 aa, Glycine max
  Clone ID: PAT_MRT3847_93182C.1.pep
MASHCFLRFPPSSFSLNPKSKRLPKPRYHPSIFSRIQTPNPDEDDKVPNDNRIDFLKLSVTLTVISASLPKPAAAATTKVKKRSPKKQSAKKPEGLSPEELKTWTSGLPVVSDRLPYSEIIELKKSGKLKHVIKPNSAKLRQRGEAVLVGLDDSRVLRTVLPSLESHSKFWDSWDEL

SEQ ID NO: 278139 - protein, 73 aa, Glycine max
  Clone ID: PAT_MRT3847_93183C.1.pep
AVQHEYSSSMRKESDLAHGCWFNIQGYVSTTQTRDAVVSTERRVTRIVTATAIIYTSSTEATVYLTLLARSRE

SEQ ID NO: 278140 - protein, 110 aa, Glycine max
  unsure (1)..(110): unsure at all Xaa locations
  Clone ID: PAT_MRT3847_93184C.1.pep
LELPELDVECGNSGLAGFSVNSLGQDALSFFKKMLLLGFFPSEFSFATVMSSCAKLSSLFQGQQFYAQIVKDGILDYIYLWSSLIEMYCXCVYLNSARCFFDVMPVINTD

SEQ ID NO: 278141 - protein, 303 aa, Glycine max
  Clone ID: PAT_MRT3847_93185C.1.pep
MDFDEYDYLEKTVEEQEDHDSSRKKKESERSYRKREEIDEGIEETKSKRSRGDEENGSKKDKDREERDRERRRDRDRDGERSSRDRDRDRDREKEREKGRERREKDKEREKREKEKEKEKERERERREREREREERERSRRSRSRSERERERERDFDTRDSRRFRDKKEAAEPEADPERDQRTVFAYQMPLKASERDAYEFFSKAGKVRDVRLIMDRNSRRSKGVGYIEFYDAMSVPMAIALSGQLLLGQPVMVKPSEAEKNLVQSNATSGAAGVVGPYGAVDRKLYVGNLHFNMTESQLREI

SEQ ID NO: 278142 - protein, 223 aa, Glycine max
  unsure (1)..(223): unsure at all Xaa locations
  Clone ID: PAT_MRT3847_93186C.1.pep
MDFDEYDYLEKTVEEQEDHDSSREKREKEKEKEKERERERREREREREERERSRRSRSRSERERERERDFDTRDSRRFTDKKEAAEPEXDPERDQRTVFAYQMPLKAXERDAYEFLSKAGKVRDVRLIMDRNSRRSKGVGNAIMMRDDGGIPCTHVXSIHAAYSRYIELYDAMSVPMAIALSGQLLLGQPVMVKPSEAEKNLVQSNATSGAAGVXGPYGAVDR

SEQ ID NO: 278143 - protein, 73 aa, Glycine max
  Clone ID: PAT_MRT3847_93187C.1.pep
RCPGIGQGLLLGGVRKECIPDASPKCFKRGRGFRERSSYARRYRTPFWSPVRKYRYNGKNDRDKYFTYRRFFP

SEQ ID NO: 278144 - protein, 152 aa, Glycine max
  unsure (1)..(152): unsure at all Xaa locations
  Clone ID: PAT_MRT3847_93188C.1.pep
PGGKGPXKQLATKGARKSAPTTGGVKKPHRYRPGTVALRGRGGGXXSTQLXIRKLPFQRGGREIAQDFKTELRFQSHAVLALQEAAEAYLVGLFEXTNLCAIHAKRVTIMPKDIQLGRRSPGERAVGGWKDEDWGLRVVFLVFRFLFLFNRW

SEQ ID NO: 278145 - protein, 44 aa, Glycine max
  Clone ID: PAT_MRT3847_93189C.1.pep
PLELYKTTAITHAWPIVNRHRLMIKHSTGDPELCYLLLRRTNCS

SEQ ID NO: 278146 - protein, 108 aa, Glycine max
  unsure (1)..(108): unsure at all Xaa locations
  Clone ID: PAT_MRT3847_9318C.1.pep
QGFLTTSNSTEPFDACKWPKSDPHSWQLIFPIKVCGPNNGFEMCSSEWANQTSWHLSFLIDNPNQSTVFDILLGISQDFAIAGNSFKPAFSVPXQATARFFENWESSA

SEQ ID NO: 278147 - protein, 85 aa, Glycine max
  Clone ID: PAT_MRT3847_93190C.1.pep
EALEKGEFVKDDRRVLQPFSKGPRSCIGKNLALHEIRLTLAYLLWHFDLYATSASENWLQQKSYLAWDRPALQVVVKGTDTASIF

SEQ ID NO: 278148 - protein, 69 aa, Glycine max
  Clone ID: PAT_MRT3847_93191C.1.pep
ALNLKLNFNLAKSKFLKTLLGVLPNPPLWNYLFKAKAKRLSFNWTTFFTTRPLQTPVGSYKNWWLPSNG

SEQ ID NO: 278149 - protein, 78 aa, Glycine max
  Clone ID: PAT_MRT3847_93192C.1.pep
SPHTLLSHPHPRSSNPTPIPNSSSNRNPFSTTNVPACITTTILLPLRRDPLIERPGLHHSQRLTRLLRPMRNAPHRAR

SEQ ID NO: 278150 - protein, 139 aa, Glycine max
  Clone ID: PAT_MRT3847_93193C.1.pep
STYVPTSKTATAIGHGRLPCCRVAALLSACLAIPTYQYCGNVCTLLTPRLTSELNHAALPDCQRLSATKCLSCTVAYHTLRPLPKFSSCWVFIFAVCVALTFSPPKQALQIYLALYNYAQLNLYLLPLYAYGTHHVIFQ

SEQ ID NO: 278151 - protein, 559 aa, Glycine max
  unsure (1)..(559): unsure at all Xaa locations
  Clone ID: PAT_MRT3847_93194C.1.pep
MFGLIGRKASLLGGSGRRRRWLSFAAAAAATTTTNGGAMEELLSQLQSHVQKALAGGGPEAVKRNTSRNKFLPRERIDRLLDPGSSFLELSQLAGHYLYEEPLPSGGVVTGIGPVHGRLCMFVANDPTVKGGTYYPITVKKHLKAQXEIAAQCKLPCIYLVDSGGAFLPKQAEVFPDRENFGRIFYNQAVMSAQGIPQIALVLGSCTAGGAYIPAMADESVMVKRHVYIFLAGPPLVKAATGEEVSAEDLGGATVHCKTSGVSDYFAQDELHALALGRNIIKNLHMAGKDVLANGLQNINYEYKEPLYDINELRSIAPTDLRQQFDIRSVIDRIVDGSEFDEFKKLYGTTLVTGFARIFGQPVGIIGNNGILFNESALKGAHFIELCTQRNIPLVFLQNITGFMVGSRSEANGIAKSGAKMVMAVSCAKVPKVTIMVGGSFGAGNYAMCGRAYSPNFLFLWPNARISVMGGAQAAGVLAQIEKGNKKRQGIQWSKEEEDKFKGKVVEAYEREASPYYSTARLWDDGIIDPADTRKVIGLSISASLNRDIQNTKYGVFRM

SEQ ID NO: 278152 - protein, 135 aa, Glycine max
  Clone ID: PAT_MRT3847_93195C.1.pep
KKELKVPKVTIMVGGSFGAGNYAMCGRAYSPNFLFLWPNARISVMGGAQAAGVLAQIEKGNKKRQGIQWSKEEEDKFKGKVVEAYEREASPYYSTARLWDDGIIDPADTRKVIGLCISASLNRAIENTKYGVFRM

SEQ ID NO: 278153 - protein, 112 aa, Glycine max
  Clone ID: PAT_MRT3847_93196C.1.pep
FLFQQHLQPFRHKHVHLLPCPPRCLRPTCHPRCLPPPCPQSPPCPQLQSCPPFPPLPQESDCVLGSSCVSSLHGSVPPTDITPSPQSQLKKKTGLVFIFAVRCISARNSGRA

SEQ ID NO: 278154 - protein, 323 aa, Glycine max
  Clone ID: PAT_MRT3847_93197C.1.pep
MAGIFSLVTGRPGLSGFGSSSTAEQVTEGIDASNLTAIITGGASGIGLETARVLAIRKVHVIIAARNMESAKEAKQLILQEDESACVDIMKLDLCSLKSVRTFVDNFIALGLPLNILINNAGVMFCPYQQTEDGIEMQFATNYLGHFLLTNLLLDKMKQTAKDTGIEGRIVNLSSIAHLYTYEEGIRFDTINDEDGYHEKKAYGQSKLANILHTNELSRRLQAEGVNITANSVHPGVIMTPLMRHSSLLMNFLKMFSFMIWKNVPQGAATTCYVALHPSLKGVTGKYLQDCNESPPSAHASNELLGRKLWDFSNKMINSLSKA

SEQ ID NO: 278155 - protein, 225 aa, Glycine max
  unsure (1)..(225): unsure at all Xaa locations
  Clone ID: PAT_MRT3847_93198C.1.pep
MPSNLDMKGMKSRFHRKLKLIPTITNLKQGLVLQLNPPIYDDQDHKPHNMAELEIGPKGSEDDKHYELKEMQFKATPTKGSKEKNLVATSPSKSMHQKIQGIEEYPSLTDFEEIHPPGGSQAVILYTTSMRGIRKTFQDCNTVCFLLRSFKIRYHERDVSLHLEYREELWKILGSKVIPPRLFIXGRYIGGADEVVGLHEMGWLGKLLEETPMDFADGPCKGVPA

SEQ ID NO: 278156 - protein, 68 aa, Glycine max
  Clone ID: PAT_MRT3847_93199C.1.pep
RKWKIWWITATISIWNFRNDMIFKNQPFVISKLVDNAIFLTWSWLRGWEKDFAVPFQQWSSSMSLAFT

SEQ ID NO: 278157 - protein, 193 aa, Glycine max
  unsure (1)..(193): unsure at all Xaa locations
  Clone ID: PAT_MRT3847_9319C.1.pep
RAATTLLADGCTYLYALAHDTSVPTIPVDFVIGVKLTTINNMCAYGLNPGISRSRLWGTIPHSISQHTVWNQMATVRTPLNFDSTMHNFCQISIDLIKGXILQDKTGXWITLIQNYPITNLLRVAAWKKGCXMVKIDMSGNASLKRSDWASLVQVFLTYRRCSQHFDACKWTKLEPHSWELILPIQVCGPNTG

SEQ ID NO: 278158 - protein, 459 aa, Glycine max
  Clone ID: PAT_MRT3847_931C.1.pep
CEICNKGFQRDQNLQLHRRGHNLPWKLRQRSNKEVRKKVYICPEQTCVHHDPARALGDLTGIKKHFSRKHGEKKWKCEKCSKKYAVQSDWKAHTKTCGTREYKCDCGTLFSRKDSFITHRAFCDALAEESARLTSVTTTNLNFKSEEGGNNVMNSQQHGLGGHGLIGAQSLQNVSGIPQFGSHGFRLDFNGMEQQIRPSLSLWLNQGNHQMNSNNNNINSNNNSASDAGPNYMSSSGLPEIVQMAHANALMGCSSSMVSNFGGVHAGSNSSSANLSLGKRGEACGSTVVDLASIYNNSEGQNKNSKPASPMSATALLQKAAQMGSTRSTNPSIFSGSFGVINSPSSQTTSLNNNNNGGAAMMLASNTSTAAANANDFSSLRHSSNSFDQLVMQTNAQLQSEPVKLKLHSNGVENNLTRDFLGVSGGGGGGGGPQFLPQELAKFASMGSPMGLSQFTSNQ

SEQ ID NO: 278159 - protein, 109 aa, Glycine max
  Clone ID: PAT_MRT3847_93200C.1.pep
SLSIKFVFFFFCFRCKKCYTATHSSFTSFCDKSLLPIKKISCSRLTDMGPGKVHWNVFDGVKIIAATPEALMAEIDSAISNLEYSRATALIDADEGYDARVADEAYKAG

SEQ ID NO: 278160 - protein, 65 aa, Glycine max
  unsure (1)..(65): unsure at all Xaa locations
  Clone ID: PAT_MRT3847_93201C.1.pep
IFSQNLRFIRSHNKXRLPYTLSGNHFADWTWEEFKXHTLGATYNCSATLNGNHKLTDAVLSPTKD

SEQ ID NO: 278161 - protein, 51 aa, Glycine max
  Clone ID: PAT_MRT3847_93202C.1.pep
PKWGYLAQDQLQFSNSDGNLVIESFPGGDKIESMLQRMEQLVDEFDPSSTA

SEQ ID NO: 278162 - protein, 106 aa, Glycine max
  Clone ID: PAT_MRT3847_93203C.1.pep
RARALSRAGLYVVSDLAESEPWGFYASVEYPCSACDELKHFLQALGFVVIHQKPNKTFSEISHDLCPVLIIQQLYWIRTMFCDDKYRTHSVSSDVICIMTALTTVD

SEQ ID NO: 278163 - protein, 87 aa, Glycine max
  unsure (1)..(87): unsure at all Xaa locations
  Clone ID: PAT_MRT3847_93204C.1.pep
KNVLYQYDPTTTXNLYTIRGKTNFFWSQQTFLYVVSNCLVLLHPYPLLSTFLKWCYYFSQNIQKSIECDLLHGNQLITFISINSNMK

SEQ ID NO: 278164 - protein, 162 aa, Glycine max
  unsure (1)..(162): unsure at all Xaa locations
  Clone ID: PAT_MRT3847_93205C.1.pep
RTMKGCYDTIMWKHELNKLENLEMGEEVKEEVFTVLKRSYDNLIEKDLQKYLLYFAQIPNNSGFQSKSYLVKKLGEXCLLKNVKRSLREVFDEACAMANKLVDHSLFVGYDYPTKMHGLVRNMACRILNESNNYMVKCEGNLSEIPDVKEWIVNLKELPWGE

SEQ ID NO: 278165 - protein, 38 aa, Glycine max
  Clone ID: PAT_MRT3847_93206C.1.pep
MCDSRESDPCIIAQPKNKFVVSKCLGNFKSAMLYPIGL

SEQ ID NO: 278166 - protein, 85 aa, Glycine max
  unsure (1)..(85): unsure at all Xaa locations
  Clone ID: PAT_MRT3847_93207C.1.pep
SLNVLSLYGTRDRETNEFSASCFVTAITDALNRTYGEPXXVVPNPTTHYINTLLVPRNGEIPVDVDCLAAQGIFDVIVVDLPKKS

SEQ ID NO: 278167 - protein, 97 aa, Glycine max
  unsure (1)..(97): unsure at all Xaa locations
  Clone ID: PAT_MRT3847_93208C.1.pep
MSIMASRAVVLFAICVLPALAVAIRPAXNPVCAKGRLYCDTCRAGFQTSASSYMAAAEILWPCMSNVSYEGVDTNIGYXDSDGGYRSYVHXDHADQL

SEQ ID NO: 278168 - protein, 115 aa, Glycine max
  Clone ID: PAT_MRT3847_93209C.1.pep
PGPGSFAFPLCRSEWICRPVWMGRAARLLFCVRWWCWRAGFLGCIFWWWFRFCSVVGLSFSLCFGLWCPASSSSSWLLGGVLLVSWARSVGLAVCGLWWSFSRGFRLFLSFSRVA

SEQ ID NO: 278169 - protein, 79 aa, Glycine max
  Clone ID: PAT_MRT3847_9320C.1.pep
RGGGGTKKEVGHGKRAEARQRGLRKGLKYGFMRLVSIRSKTSRGASRALKGKKCRSEMNLAGSWQIERDACPKDKDAYL

SEQ ID NO: 278170 - protein, 46 aa, Glycine max
  Clone ID: PAT_MRT3847_93210C.1.pep
NRFVSFGAEDLYNSTKVLVYGVFGEENNSRILEFQFLLFMRTVHVE

SEQ ID NO: 278171 - protein, 57 aa, Glycine max
  unsure (1)..(57): unsure at all Xaa locations
  Clone ID: PAT_MRT3847_93211C.1.pep
MASLATCAAAQPATINELAXSSLSGTKLSFKPSRHSVKSKNFTSIAVVAKYIHKSVY

SEQ ID NO: 278172 - protein, 70 aa, Glycine max
  Clone ID: PAT_MRT3847_93212C.1.pep
TNQSYLRVRAPYYRFDSYIKMQNSEQQTTTLMLKLPCQLPTLLPHAPYWFLQVLYYLRGLPLSTLRTVTH

SEQ ID NO: 278173 - protein, 56 aa, Glycine max
  Clone ID: PAT_MRT3847_93213C.1.pep
MVILLAVKSCIARWRGNYKRRQAHESDPNLKDQNTAALLLQRERDTVDRELLVLVA

SEQ ID NO: 278174 - protein, 259 aa, Glycine max
  unsure (1)..(259): unsure at all Xaa locations
  Clone ID: PAT_MRT3847_93214C.1.pep
MGEEKKDEGNKEEAKEEKKEEEKKEEPPPEIVLKVDMHCEACARKVAKALKGFQGVEEVSADSRTSKVVVKGKAADPIKVCERLQKKSGKKVELISPLPKPPEEKEEPPKEEPPKEEKKYEPPPVVTVVLKVRMHCEACAQVIQKRIRKIKGVESVETDLANDQVIVKGVVDPAKLVDHVYKRTKKQAIEGRRKEGRKKEEKKEEKEEEKRGEEGEEKDRKTEIKRSEYWPSXKHQVIHXYPYDPQIFSDENPNACTVM

SEQ ID NO: 278175 - protein, 152 aa, Glycine max
  Clone ID: PAT_MRT3847_93215C.1.pep
KTGGLSGAVFFLAPVKGRAPAPGFYPIGFCFDGAVTGGVVYAFDRATSAWYQGRVWFFRFCPRGVEPGWFWTRPAFGFLGLSPAAPQPDFDFNDLGMFVAFLFSFFFFSFFGLFFVFPLFLLQFHFFVKNSARLPLFVEPLPIPFKNSYFLL

SEQ ID NO: 278176 - protein, 71 aa, Glycine max
  unsure (1)..(71): unsure at all Xaa locations
  Clone ID: PAT_MRT3847_93216C.1.pep
VLNWVMXYRCFFFSYVNILLHFILFHQSNHSLKIMIDSNHGLLNYIRSTILSFQPKKIHFHPHVANGRQNL

SEQ ID NO: 278177 - protein, 32 aa, Glycine max
  unsure (1)..(32): unsure at all Xaa locations
  Clone ID: PAT_MRT3847_93217C.1.pep
XXIDNASLLGNIYGHYIYXLQICQQIIPLKVF

SEQ ID NO: 278178 - protein, 84 aa, Glycine max
  Clone ID: PAT_MRT3847_93218C.1.pep
FNCLKQNIIIRFQHCTHLYAKVYTSGYSFSAPVKQSGIQKRAKLRGLATSLVCLKCQTFYHQTRIHTSLPAPFLAFSQPTNTRP

SEQ ID NO: 278179 - protein, 444 aa, Glycine max
  Clone ID: PAT_MRT3847_93219C.1.pep
MESKPHVLMQRYELGRLLGQGTFGKVYYARSTITNQSVAIKVIDKDKVMRTGQAEQIKREISVMRLARHPNIIQLFEVLANKSKIYFVIEYAKGGELFNKVAKGKLKEDVAHKYFKQLISAVDYCHSRGVYHRDIKPENILLDENGNLKVSDFGLSALVDSKRQDGLLHTPCGTPAYVAPEVIKRKGYDGYLPFHDPNLIEMYRKISKAELKCPNWFPPEVCELLGMMLNPNPETRIPISTIRENSWFKKGQNIKNKRPVVENNTVSSSSTVLLDQNDCDGLAAEANGESVVPLSINAFDIISRSVGFDLSRFFDESFKKKEARFSSRLPANVIISKLEDIANQLRMKIKKKAAGLLKLESLNEGRKGVLSIDAEIFEVTPCFHMVEVKKSNGDTLEYQKILKEDIRPALQDIVWVWQSDQQLQSQQSEQQQQTDDQQQQQPQS

SEQ ID NO: 278180 - protein, 98 aa, Glycine max
  unsure (1)..(98): unsure at all Xaa locations
  Clone ID: PAT_MRT3847_9321C.1.pep
GNFSFDTKSRSRLEKVSFTKAQFVSGKTFKYDIIGAGSHSSEDFPEKEDQEKPKKIDARLRQRIXDSQSNEVHAXMETNLXNCLLMNVETTKGFMLEF

SEQ ID NO: 278181 - protein, 61 aa, Glycine max
  Clone ID: PAT_MRT3847_93220C.1.pep
FLRQGALRFLFKHPLPHSPHANNPNTLQPLYQIHKIPLSKDPEPPTEFPERPGYPDRDHPT

SEQ ID NO: 278182 - protein, 462 aa, Glycine max
  Clone ID: PAT_MRT3847_93221C.1.pep
MESKPHVLMQRYELGRLLGQGTFGKVYYARSTITNQSVAIKVIDKDKVMKTGQAEQIKREISVMRLARHPNIIQLFEVLANKNKIYFVIECAKGGELFNKVAKGKLKEDVAHKYFKQLINAVDYCHSRGVYHRDIKPENILLDENGNLKVSDFGLSALVDSKRQDGLLHTPCGTPAYVAPEVIKRKGYDGTKADIWSCGIVLFVLLAGYLPFHDPNLIEMYRKISKAELKCPNWFPPEVCELLGMMLNPNPETRIPISTIRENSWFKKGQNIKNKRPVVENNTVSSSSTVLLDQNDCDGLAAEANGESVVPLSINAFDIISRSVGFDLSRFFDESFKKKEARFSSRLPANVIISKLEDIANQLRMKIKKKAAGLLKLESLNEGRKGVLSIDAEIFEVTPCFHMVEVKKSNGDTLEYQKILKEDIRPALQDIVWVWQSDQQLQSQQSEQQQQTDDQQQQQPQS

SEQ ID NO: 278183 - protein, 104 aa, Glycine max
  unsure (1)..(104): unsure at all Xaa locations
  Clone ID: PAT_MRT3847_93222C.1.pep
DLDCTLASVLTSLLKPELAHDMTERTNGQTFGQPATCNARCKSSITIRVTIKADYYADKLITTAKTVTVPVTINEAMDDCNATWAKSVPXITLDNTQAYRKAYR

SEQ ID NO: 278184 - protein, 78 aa, Glycine max
  unsure (1)..(78): unsure at all Xaa locations
  Clone ID: PAT_MRT3847_93223C.1.pep
XSLIXNYDHFCGRKFAGNTRXAXSXRRFXFPLXKNXXFRLSWGXMASETXVXNLGXESQSRGXXXXXXXXGFXXXXKI

SEQ ID NO: 278185 - protein, 61 aa, Glycine max
  Clone ID: PAT_MRT3847_93224C.1.pep
IRSNGSCLVQVGTTSPSKIKPMFVVHVSRHGPMLSSAYKFKRPRLMCDVRLCLCNVIAEIF

SEQ ID NO: 278186 - protein, 61 aa, Glycine max
  unsure (1)..(61): unsure at all Xaa locations
  Clone ID: PAT_MRT3847_93225C.1.pep
GGLLVGIFSGAAAAVAFRVGKGPXNPGKLFGVVFPSFGERFLSTFFFPSIREECEKMPPGP

SEQ ID NO: 278187 - protein, 96 aa, Glycine max
  Clone ID: PAT_MRT3847_93226C.1.pep
LLYCVLVDPTVITAGKIPGCPNRPVPMRMACIGSNIAARGYDRQDGINTVADNRTDLVAYGRWVLLNPYLPKRFAVLAALNKYHLETFYTADSDLG

SEQ ID NO: 278188 - protein, 52 aa, Glycine max
  Clone ID: PAT_MRT3847_93227C.1.pep
RTYYDHFHGTKVLQFIKHTSSPVWMVGTLTKFFGLRTNKGPSSYSGWKIQLR

SEQ ID NO: 278189 - protein, 70 aa, Glycine max
  Clone ID: PAT_MRT3847_93228C.1.pep
LYNKIRDHVIVSCIINVTVDYRSGLISLERTPTTWHAIPMPDVNIHTTEYLYLCGTILHQESCEMLHDLG

SEQ ID NO: 278190 - protein, 35 aa, Glycine max
  Clone ID: PAT_MRT3847_93229C.1.pep
IQTITCIFLHDPERLSDSVTLHSVLHHTYSDRTWT

SEQ ID NO: 278191 - protein, 135 aa, Glycine max
  unsure (1)..(135): unsure at all Xaa locations
  Clone ID: PAT_MRT3847_9322C.1.pep
SDSRTAMVXKNSKPQATAMHVGAIEIIIDSFASPDCNIVGAKPLVDTYHTNSENAGRSIFVVPFIGGRPIRVVTFPNTIGQIEPDMNPRVQLLSTTTNGDFVXEKISAMVKVXEACACVGLTFMFQLNSLCWNTG

SEQ ID NO: 278192 - protein, 71 aa, Glycine max
  unsure (1)..(71): unsure at all Xaa locations
  Clone ID: PAT_MRT3847_93230C.1.pep
ISAITCRGFPPYRGGFILGANSLGSVCIHSGWDXWSEQSRELFYQCAYPASTSSEAIPFSPSFKQQTVSCM

SEQ ID NO: 278193 - protein, 65 aa, Glycine max
  unsure (1)..(65): unsure at all Xaa locations
  Clone ID: PAT_MRT3847_93231C.1.pep
ILVSSIAFALAHFNIQRMLPLLFFPMIIVNFFCRSRNLFPSMLLHSLXNAFVFLYLIKSIKTVFS

SEQ ID NO: 278194 - protein, 37 aa, Glycine max
  Clone ID: PAT_MRT3847_93232C.1.pep
ERITKLEVRSTRLLISDFPSIKFLNQNMHRVLKITCN

SEQ ID NO: 278195 - protein, 84 aa, Glycine max
  Clone ID: PAT_MRT3847_93233C.1.pep
YSTYPPQHSHLPLLQHPPKKIIPSHRKLTYPGVRRLLASRKYGGGSLYAVFPLHLQRDYFQIQAHDQPVTKAQLYHCFRAHPHC

SEQ ID NO: 278196 - protein, 84 aa, Glycine max
  unsure (1)..(84): unsure at all Xaa locations
  Clone ID: PAT_MRT3847_93234C.1.pep
YFSTLKNYNNLGSLVLRGIFSTRRTLDTQAATXSYLKKADYHTXKKLILKDPQNPYNPNAGXYITAARETLIRLLYNIATIIGH

SEQ ID NO: 278197 - protein, 75 aa, Glycine max
  Clone ID: PAT_MRT3847_93235C.1.pep
MMKREKKAVNFGCWLMQLNADVGGVQFSVLKGSRSTHFSSTLLSNFPTTTTTTKYSNFELENRSFQPRCREQPKD

SEQ ID NO: 278198 - protein, 196 aa, Glycine max
  Clone ID: PAT_MRT3847_93236C.1.pep
MSTKLIETSLSLMVWLVIATSAIAQSDNPPVLDTEGHPLEPGRDYYITPAVTDIGGRATIVDNGTCPLFVGQENTFVEESFAVFFTPFAKEDDVVKVNRDFQVAFSAATLCLQGTGWTLGERDTESGRRLIVVGGVGSYFRISETQVKGVYNIGWCPIDVCPFCKFDCGIVGGLRENKKIFLALDGNVLPVVFERA

SEQ ID NO: 278199 - protein, 42 aa, Glycine max
  Clone ID: PAT_MRT3847_93237C.1.pep
KSLHTNQLAEGKWIRKLVKVSELTQEFDNHGNMFFIGFKYFG

SEQ ID NO: 278200 - protein, 45 aa, Glycine max
  Clone ID: PAT_MRT3847_93238C.1.pep
LVTEQNGKIKTLFKGVNFPSLLWGESTPNLHSRCLFVHWEGKWFL

SEQ ID NO: 278201 - protein, 92 aa, Glycine max
  unsure (1)..(92): unsure at all Xaa locations
  Clone ID: PAT_MRT3847_93239C.1.pep
LYGXLVRETMFVIYKLLVQIVKNGFKRNRHFHGCLNKKPWAYKTTDGRVEKKSAWGRQGLSKQNGFSTHAKYLKLVFLSLTLLTGTVRGPML

SEQ ID NO: 278202 - protein, 70 aa, Glycine max
  Clone ID: PAT_MRT3847_9323C.1.pep
RTDFYDGRKRTVLETRDFLHRWCCRHDFFYDVFYDGPFMIDVESYDFYIAACIETTLFITCSTSVILRRM

SEQ ID NO: 278203 - protein, 325 aa, Glycine max
  Clone ID: PAT_MRT3847_93240C.1.pep
MSSYLGVGVSPGNVPVYHSTNVNVLDRRIKITELVLRCVILGLGVLAAVLVGTDSQVKEFFSFQKEAKFTDMKSLVFLVVANGLAAGYSLIQGLRCILSMIRGSVLFSKPLAWAIFSGDQVMAYVTVVALAAAGQSGMIARVGQPELQWMKICNMYGKFCNQVGVRLILKGKMSYLGLGVSPSTVPMYHGTKLKVLDRRVRITELVLRCVSLGLGVVAIVLVVTDSQGKEFFSFQKKAKFTDMKALVFLVVANGLTVGYSLIQGLRCVVSMVRGNVLFSKPLAWLIFSGDQPYTKIHSNTYQVYNFLSTAPCPKAKYQYFLGSSW

SEQ ID NO: 278204 - protein, 59 aa, Glycine max
  Clone ID: PAT_MRT3847_93241C.1.pep
ASNPSFKTLSKLNKPVAQDLPKRLINKPKKFQTCHEIPLSIIPFQATNLGLSRAVPTGH

SEQ ID NO: 278205 - protein, 93 aa, Glycine max
  Clone ID: PAT_MRT3847_93242C.1.pep
LYCVQYVNLPQCCFLQAIKLWWKNVRFVQHPRYSIPTYKDEALMRDKKLQCCGLSDDNRQHLQQRGSDPGCCLAELSPQNRWFRWRDAKWPWS

SEQ ID NO: 278206 - protein, 80 aa, Glycine max
  Clone ID: PAT_MRT3847_93243C.1.pep
LPIYTHEIRTFLQVLRLFKSLSLSYRTLFLSDPKVLIFHFRYHVHFFHSERHRHPQNAATFAVKRVWFCFVTGNGIFRPN

SEQ ID NO: 278207 - protein, 156 aa, Glycine max
  Clone ID: PAT_MRT3847_93244C.1.pep
AVISSLRRLKPRIVTVVEEEADLDIGLEGFEFVKGFEECLRWFRVYFEALDESFPRTSNERLMLERAAGRAVVDLVACSPADSVERREKAARWARRMHGGGGFNTVAFSEEVCDDVRALLRRYREGWAMTQCSDAGIFLTWKEQPVVWASAWRALT

SEQ ID NO: 278208 - protein, 152 aa, Glycine max
  unsure (1)..(152): unsure at all Xaa locations
  Clone ID: PAT_MRT3847_93245C.1.pep
TQTDELAQVTDEVANETEWNLREEKPAVAEDLAGVSKDCPTNETRELXPGDNEMTLDECEKVLEXRTIAFPALKTDEREVYTIEFGSMHALSSKTDNHDVFIXLGSDEDMLNEAFAKVELYITRVSITELMMPADGEAYYNSPRGKRRGRGS

SEQ ID NO: 278209 - protein, 114 aa, Glycine max
  Clone ID: PAT_MRT3847_93246C.1.pep
CNFKNKRGGKVKLQSIVMPLSEFDHEEKGDALYAMELALSLEKLTNEKLLNLHSVASKNNDVQLADFIESEFLGEQVEAIKKISEYVAQLRRVGKGHGVWHFDQMLLHEEGVAA

SEQ ID NO: 278210 - protein, 88 aa, Glycine max
  Clone ID: PAT_MRT3847_93247C.1.pep
PLARLSSKQHVSTSTNGGSVAEVRTQVMYRRVYCGHRKGLCHSHKRCVCKKQEFKWMFSLGALFKYQTKCSLLLLVLKIMCARKWVCV

SEQ ID NO: 278211 - protein, 49 aa, Glycine max
  unsure (1)..(49): unsure at all Xaa locations
  Clone ID: PAT_MRT3847_93248C.1.pep
ATAHDVXSETFDVEGCPTAYFTTXSGKLSQYXGGRTTEDIIEYIEKNRD

SEQ ID NO: 278212 - protein, 248 aa, Glycine max
  Clone ID: PAT_MRT3847_93249C.1.pep
MLLRTASSFSLFNANGDHILLPSSVRYSQGKHLVPCATKNSNNRPLTGVVFEPFEEVKKELDLVPTVPQASLARQKYTDESEATINEQINVEYNVSYVYHAMFAYFDRDNVALKGLAKFFKESSEEEREHAEKLMEYQNKRGGKVKLQSIVMPLTEFDHEEKGDALYAMELALSLEKLTNEKLLNLHSVASKNNDVQLADFIESEFLGEQVEAIKKISEYVAQLRRVGKGHGVWHFDQMLLHEEGVAA

SEQ ID NO: 278213 - protein, 81 aa, Glycine max
  Clone ID: PAT_MRT3847_9324C.1.pep
ELFFPIKVCGPKNGFKMWSSEWAKQTSWHLGFLIANPKQSPVFDILLGISQNFEIAGKTLRPAFFVPQAAARFFENGESSA

SEQ ID NO: 278214 - protein, 384 aa, Glycine max
  unsure (1)..(384): unsure at all Xaa locations
  Clone ID: PAT_MRT3847_93250C.1.pep
MALRLRGKWVLIPFFWFCLIPFCFSQQKLRLRFGKNGEFKILQIADLHFANGKTTHCLDVLPSQYASCSDLNTTAFIQRIILSEKPNLIVFTGDNIFGYDASDPAKSMDAAFAPAIASNIPWVAVLGNHDQEGSLSREGVIKYIAGMKNTLSIVNPPEVHIIDGFGNYNLEVGGVEGTDFENKSVLNLYFLDSGDYSKVPFIPGYGWIKPSQQLWFQRTSAKLRKAYISKPVPQKDAAPGLAYFHIPLPEYASLDSSXNMTGVKQEPAGNSTSVNSGFFTTLHDXVAAGDVKAVFTGHDHLNDFCXGNLMNIQLCYAGGFGYHAYGKAGWSRRARVVVASLEKTEKGSWGDVKSIKTWKRLDDQHLTGIDGEVLWSKSTGGNQG

SEQ ID NO: 278215 - protein, 54 aa, Glycine max
  unsure (1)..(54): unsure at all Xaa locations
  Clone ID: PAT_MRT3847_93251C.1.pep
TGGRKGEMRIVDPESGHAXPENKXGARRIGGDPTVKGYQNDGEGTERTIDKAGW

SEQ ID NO: 278216 - protein, 68 aa, Glycine max
  Clone ID: PAT_MRT3847_93252C.1.pep
KGIKLFHQGYGSKLLRRHGPWSLGQFGHEQIFHSVGRLSSWAMYLGYECMTPWHFVTLVHKVDEISEL

SEQ ID NO: 278217 - protein, 85 aa, Glycine max
  unsure (1)..(85): unsure at all Xaa locations
  Clone ID: PAT_MRT3847_93253C.1.pep
XCGHVPESRAXXTGGIFRWPDEXSMAVPVVRSEKERTNCXEAVIIFPGKKPCKKVAAVXSVCXXLFEVLIYINXDGSLAYRAHSX

SEQ ID NO: 278218 - protein, 289 aa, Glycine max
  Clone ID: PAT_MRT3847_93254C.1.pep
LEVTTLLNLSINDNNKAVIANSGAIEPLIHVLQTGSPEAKENSAVTLFSLSVTEENKIRIGRSGAIRPLVDLLGNGTPRGKKDAATALFNLSLFHENKDLIVQAGAVKNLVELMDPAAGMVDKAGAVLANLATIPEGKTAIGQQGGIPVLDEDIEMGSVRGKENAAAALLHLCSDNHRYLNMVLQEGAVPPLVALSQSGTPRAKEKALALLNQFRKPKTWERWESLILIFQPCEPSKGFESTYKICKIYTLHCAHNMRKVFIFFIFLLFTHACKGGEYVWRRRIDCVLM

SEQ ID NO: 278219 - protein, 65 aa, Glycine max
  Clone ID: PAT_MRT3847_93255C.1.pep
LNLLSVSSKCPTCQYLICRQRGVVAGLQLLANTVVQEISGINWRINFPGLLQLYHNLMSSTLDLI

SEQ ID NO: 278220 - protein, 63 aa, Glycine max
  unsure (1)..(63): unsure at all Xaa locations
  Clone ID: PAT_MRT3847_93256C.1.pep
XXGXPXFFXFFXXSFXYKNIITAKNKIYASVKSVHWPYFSFGRPQTCQKLKKMLNWYIMKLKR

SEQ ID NO: 278221 - protein, 111 aa, Glycine max
  unsure (1)..(111): unsure at all Xaa locations
  Clone ID: PAT_MRT3847_93257C.1.pep
CRKHLSLVTPSLNYGPWSVVNQYESDADIPRGHIAFKRXMVKYADEXGTSACLHDTYLRHWVVVRCYRPRYETTHTSYDGHRTLDNFWPYISEEQQVMPVRYIWTMLWPWI

SEQ ID NO: 278222 - protein, 99 aa, Glycine max
  Clone ID: PAT_MRT3847_93258C.1.pep
ERITLNNHTIPSIRIGENKFCVADNTPPWSFPLDTVSVEHNTSSPPTNQANAIKNYSPPRVSVATPRKKRIGPGGMACMIGGGTLVATVVALFVANLFE

SEQ ID NO: 278223 - protein, 119 aa, Glycine max
  Clone ID: PAT_MRT3847_93259C.1.pep
MKKVFVAFLTLQVVLVLTIIAAEPAGKGYNCEKAKSSVTPCIKYLTSKVDTPSAACCNGVKEVKSSAPTKDEKIAACQCLKEVTTHIPNLKEDRATALPKQCGVDVGFLITKKNCSSIA

SEQ ID NO: 278224 - protein, 194 aa, Glycine max
  Clone ID: PAT_MRT3847_9325C.1.pep
RVSSVTDHVGNQDTTAKSADFDDDEGGLSLNAQSRALLMQKLDRSGIAASIGLPIANGSSPAQQAIMPIGNPGIVPAVAPAVPTQIMPIPVTEPVGNPSECLLLKNMFDPNTETEPDFDLDIKEDVEEECSKYGRVKHIYVDKRSAGFVYLQFETVEAASAAQRAMHTRWFAGRMISAIYMLPQMYETKFKGDA

SEQ ID NO: 278225 - protein, 105 aa, Glycine max
  unsure (1)..(105): unsure at all Xaa locations
  Clone ID: PAT_MRT3847_93260C.1.pep
AREGLTIASLDWSNKPDKCAKTAAPMTYYQISQNKEAXILQHNDGDGRLTTTEQGTAQLLFSLYQTVTYLGDMKNEDAANGLXTIDLINMINRLDSKKKDTDSEE

SEQ ID NO: 278226 - protein, 188 aa, Glycine max
  unsure (1)..(188): unsure at all Xaa locations
  Clone ID: PAT_MRT3847_93261C.1.pep
SFFASGVIDGMIYVAGGNSTDLYELDSAEVLDPLNGSWRPIANMGTNMASYDAAVLNGKLLVTEGWLWPFXLREGWTGSSVVVYGHLFVVSELERMKLKVYEPENDSWEAIEGPPLPEQICKPFAVNACDCHIYVVGRNLLVAVGHITRLNPKESCKEKWNFSVRWHVIDAPESLSDLTPSSSQVLFA

SEQ ID NO: 278227 - protein, 154 aa, Glycine max
  Clone ID: PAT_MRT3847_93262C.1.pep
MAKVAIVELNRNCANTVEEIVKMERKIFPKHESLASFFHDELRKKNSGLLYIHVNGVIAGYVMYSWPSSLYGSITKLAVKEQWRGQGHGEALLKAGIEKCRTRKVSRIMLHVDPLRTPAVNLYKKHGFQIDTLVEGYYSSDRDAYRMYLDFDSS

SEQ ID NO: 278228 - protein, 112 aa, Glycine max
  Clone ID: PAT_MRT3847_93263C.1.pep
MTEPQNPSPLTHSPALEITPQPLLPPKRKRSLPGMPDPDAEVIALSPKTLLATNRFVCEICNKSFQRDQNLQLHRRGHNLSWKLTQRGSTEPRKKAYVCPEPCCVHHNPARA

SEQ ID NO: 278229 - protein, 110 aa, Glycine max
  Clone ID: PAT_MRT3847_93264C.1.pep
PPRPLTNFVIPLSVTSPLLLHLTISLSHSRIHESPSSILLPPAGCSVTFSLFLFFLLLPLFSSFSHIPTWPALVYPDLELGSAPTLSKTFSKAVSTCTASCTLSASYVLS

SEQ ID NO: 278230 - protein, 59 aa, Glycine max
  Clone ID: PAT_MRT3847_93265C.1.pep
EHGKIIINALIDIVDIVMKNLEADVVKRLDFGDLEAAYEFYYWYARINGFCIRKSKTEK

SEQ ID NO: 278231 - protein, 58 aa, Glycine max
  Clone ID: PAT_MRT3847_93266C.1.pep
KALFSKKLKKKEKKKKKKKKKKKKRTKTKKKKKKKYKKKKKKKKKKKKKQNKKMGAAF

SEQ ID NO: 278232 - protein, 70 aa, Glycine max
  Clone ID: PAT_MRT3847_93267C.1.pep
RPGSTVIHFHLSTDVASRGERKICSKTRVNKKKKKKKKKKKKKKKKKKKKKKKKKKKKKKKKKKKKKGGP

SEQ ID NO: 278233 - protein, 163 aa, Glycine max
  Clone ID: PAT_MRT3847_93268C.1.pep
INSHKFNTLHRYRAVTSAYYRGALGAMLVYDITKRQSFDHVARWVEELRAHADSSIVIMLVGNKADLVDQRMVPTEDAVEFAEDQGLFFSETSALSGDNVESAFLKLLEEINRVVSKKALECGYGKENGDNNVVASLNGTKVDIILGPELEISEMKKLSSCSC

SEQ ID NO: 278234 - protein, 53 aa, Glycine max
  unsure (1)..(53): unsure at all Xaa locations
  Clone ID: PAT_MRT3847_93269C.1.pep
SLADRRLSMSRLDLGRGAASYEQGNXGASGAAGTLSRGISECVVMAGDTEPRE

SEQ ID NO: 278235 - protein, 113 aa, Glycine max
  unsure (1)..(113): unsure at all Xaa locations
  Clone ID: PAT_MRT3847_9326C.1.pep
HDHHEEQQARETHRRKEPRERTDQQLKTRSRRGWPGKKTEVEFLKHVTTKGEVTKKTTTRPADDCPWTHAAETGRXPPXQTASPNKTIIHKPGPXXRAKXGGNSETGLSTLRE

SEQ ID NO: 278236 - protein, 185 aa, Glycine max
  Clone ID: PAT_MRT3847_93270C.1.pep
QLFPRFGFTKQNELFVGRVAMLGFAASLLGEGITGKGILAQLNLETGIPLYEAEPLLLFFILFTLLGAIGGLGDRGKFVDDEPTTGGVIPPGKGFREALGLGSGPLFGFTKANELFVGRLAQLGFVFSLIGEIITGKGALAQLNIETGVPINEIEPLVLFNVLFFFIAALNPGTGKFVTDEGEDD

SEQ ID NO: 278237 - protein, 88 aa, Glycine max
  Clone ID: PAT_MRT3847_93271C.1.pep
KACAPKGRWDKGTRYPGDGLVLHSETTDTAKDLIDKLRDVRTQTAKPNCGGGFPHIDCRRYIEISTDTWTNTTHKHLKDTLGEVSHTA

SEQ ID NO: 278238 - protein, 366 aa, Glycine max
  Clone ID: PAT_MRT3847_93272C.1.pep
MYENTMRSSGADLTAAMVPLLKLLCLTVIGLLLANPTMQFIPKATFKLLSKLVFALFLPCLIFTELGESITLENFVDWWFIPVNVLVSTALGCLLGFLVVIICHPPPELTRFTIIMTGFGNTGNLLLAVVGSVCHTKDNPFGKHCNTRGVAYVSLSQWVSVILVYTLVYHMMEPPMEYYEVVEEGAEIEQERTLNDISRPLLVEAEWPGMAREETEHSKTPFIAGIFKSISGVSSSNIPELEVTAESGGTSSPKSIRCLAEPRVVRRIRIVAEQTPIQHILQPPTIASLLAIIIGTVPQLKAVFFGYDAPLSFITDSLEILAGAMVPSVMLILGGMLAEGPNESKLGLKTTIGITFAFFTVERTRS

SEQ ID NO: 278239 - protein, 74 aa, Glycine max
  Clone ID: PAT_MRT3847_93273C.1.pep
IERPTHSMFAYCSNKDTRQWTGPILSLYQVCTLYLWPFFLALFKRYWLERRVYMNYCFDTYLNTIKNKAISLSF

SEQ ID NO: 278240 - protein, 90 aa, Glycine max
  unsure (1)..(90): unsure at all Xaa locations
  Clone ID: PAT_MRT3847_93274C.1.pep
AXLTPQTCPLLPGGKPXTRXXVXMSXMPXXLINFATYDXSDHVIXKVXXXXSXXPXXXTPDTTXHNNNYTIXSXXTFPXSXNXXHXHXXT

SEQ ID NO: 278241 - protein, 61 aa, Glycine max
  Clone ID: PAT_MRT3847_93275C.1.pep
WCLLLRQFLSLLRISFGSLTCSSTESVDRSSLPEFLPLLIQVGESMPMAYSIQCIILESLP

SEQ ID NO: 278242 - protein, 227 aa, Glycine max
  unsure (1)..(227): unsure at all Xaa locations
  Clone ID: PAT_MRT3847_93276C.1.pep
MALAFTSSISAPTSTFPSSEPKLPQIGSIRISERPIGGAVNFNLSQRRSLVKPVNAEPPRKDSIVPLAATTIVASASETKEEDFEQIASDLDNASPLEIMDRALDKFGNDIAIAFSGAEDVALIEYAKLTGRPFRVFSLDTGRLNPETYQLFDAVEKHYGIRIEYMFPDAVEVQALVRSKGLFSXYEDGHQECCRVRKVRPLRRGPXGLRAWITXGQRKDQSPGTRS

SEQ ID NO: 278243 - protein, 106 aa, Glycine max
  Clone ID: PAT_MRT3847_93277C.1.pep
LLRPYDERGAEEDRMKLSKEEQTFLEGLMLNMAQNVDPQPKKVVEQGQVDQIAQDKEINILNLHVTSNIRFHVLMEMEISVKVTPILTPQVATSDATFGTKSINRF

SEQ ID NO: 278244 - protein, 48 aa, Glycine max
  Clone ID: PAT_MRT3847_93278C.1.pep
TQLIITPLLYNTFLNTINSNILQLIQIQVTTYSFSTYHLFALYPMIIT

SEQ ID NO: 278245 - protein, 815 aa, Glycine max
  Clone ID: PAT_MRT3847_93279C.1.pep
ITGKSTLTDSLVAAAGIIAQEVAGDVRMTDTRADEAERGITIKSTGISLYYEMTDEALKSFKGERNGNEYLINLIDSPGHVDFSSEVTAALRITDGALVVVDCVEGVCVQTETVLRQALGERIRPVLTVNKMDRCFLELQVDGEEAYQTFQRVIENANVIMATYEDPLLGDVQVYPEKGTVAFSAGLHGWAFTLTNFAKMYASKFGVDEGKMMERLWGENFFDPATKKWTSKNSGSATCKRGFVQFCYEPIKQIINTCMNDQKDKLWPMLQKLGVTMKSEEKDLMGKALMKRVMQTWLPASSALLEMMIFHLPSPSTAQKYRVENLYEGPLDDQYASAIRNCDPEGPLMLYVSKMIPASDKGRFFAFGRVFSGRVSTGLKVRIMGPNYVPGEKKDLYVKSVQRTVIWMGKRQETVEDVPCGNTVAMVGLDQFITKNATLTNEKEVDAHPIRAMKFSVSPVVRVAVQCKVASDLPKLVEGLKRLAKSDPMVVCTIEESGEHIVAGAGELHLEICLKDLQDDFMGGAEIIKSDPVVSFRETVLERSCRTVMSKSPNKHNRLYMEARPLEEGLAEAIDDGKIGPRDDPKVRSKILSEEFGWDKDLAKKIWCFGPETLGPNMVVDMCKGVQYLNEIKDSVVAGFQWASKEGALAEENMRAICFEVCDVVLHADAIHRGGGQIIPTARRVFYASQITAKPRLLEPVYLVEIQAPEQALGGIYSVLNQKRGHVFEEMQRPGTPLYNIKAYLPVIESFGFSSTLRAATSGQAFPQCVFDHWDMMSSDPLEAGSQAAQLVTDIRKRKGLKEQMTPLSEFEDKL

SEQ ID NO: 278246 - protein, 43 aa, Glycine max
  Clone ID: PAT_MRT3847_9327C.1.pep
AKLFSLVYNPFKKLVTNSFHHIIIYLTFIFCVQHVYFFRANFI

SEQ ID NO: 278247 - protein, 844 aa, Glycine max
  unsure (1)..(844): unsure at all Xaa locations
  Clone ID: PAT_MRT3847_93280C.1.pep
MVKFTAEELRRIMDYKHNIRNMSVIAHVDHGKSTLTDSLVAAAGIIAQEVAGDVRMTDTRADEAERGITIKSTGISLYYEMTDEALKSFKGERNGNEYLINLIDSPGHVDFSSEVTAALRITDGALVVVDCVEGVCVQTETVLRQALGERIRPVLTVNKMDRCFLELQVDGEEAYQTFQRVIENANVIMATYEDPLLGDVQVYPEKGTVAFSAGLHGWAFTLTNFAKMYASKFGVDEGKMMERLWGENFFDPATKKWSSKNTGSATCKRGFVQFCYEPIKQIINTCMNDQKDKLWPMLQKLGVTMKSEEKDLMGKALMKRVMQTWLPASSALLEMMIFHLPSPSTAQKYRVENLYEGPLDDQYASAIRNCDPEGPLMLYVSKMIPASDKGRFFAFGRVFSGRVSTGLKVRIMGPNYVPGEKKDLYVKSVQRTVIWMGKRQETVEDVPCGNTVAMVGLDQFITKNATLTNEKEVDAHPIRAMKFSVSPVVRVAVQCKVASDLPKLVEGLKRLAKSDPMVVCTIEESGEHIVAGAGELHLEICLKDLQDDFMGGAEIIKSDPVVSFRETVLERSCRTVMSKSPNKHNRLYMEARPLEEGLAEAIDDGKIGPRDDPKIRSKILSEEFGWDKDLAKKIWCFGPETLGPNMVVDMCKGVQYLNEIKDSVVAGFQWASKXGALAEENMRAICFEVCDVVLHADAIHRGXGGQIIPTARRVFYASQITAKPRLLEPVYLVEIQAPEQALGGIYSVLNQKRGHVFEEMQRPGTPLYNIKAYLPVIESFGFSSTLRAATSGQAFPQCVFDHWDMMSSDPLETGSQAAQLVTDIRKRKGLKEQMTPLSEFEDKL

SEQ ID NO: 278248 - protein, 111 aa, Glycine max
  Clone ID: PAT_MRT3847_93281C.1.pep
LTSVLAPTLARRPAHLLTPVMRTCFLPRTAGWCGGVERGGAGLAGLLIFFIFSLSLPVRCGAFSRGFWPVVPVVFLGAYPVWGANLSLHHFGHPKGPGPFLGGFWGPRGLP

SEQ ID NO: 278249 - protein, 46 aa, Glycine max
  Clone ID: PAT_MRT3847_93282C.1.pep
ARTTIQTIEEITGTHRAEDIYAVLKACCMDSNETTQKLILHDTFHE

SEQ ID NO: 278250 - protein, 172 aa, Glycine max
  unsure (1)..(172): unsure at all Xaa locations
  Clone ID: PAT_MRT3847_93283C.1.pep
ARGPVIFIDTDKLPALEARDQKIVNNPIEAQIIAEVAKELVKNGIGSEHIGIITPYNSQANLIRNAASMTSLEIHTIDKYQGRDKDCILVSFVRSTENPTSCAASLLGDWHRINVALTRAKKKLIMVGSRRTLLRVPLLKLLIKKVEEQSGIXTVTKKDIYRKSELRCSQMR

SEQ ID NO: 278251 - protein, 81 aa, Glycine max
  Clone ID: PAT_MRT3847_93284C.1.pep
NFSEFLPKLGGFLNPPFFLPFLIYIFIGIFGIPGIFLLFGVIILLWSTRPKLDSGTSKMHERRRSGGSSFSPREEEKPKPS

SEQ ID NO: 278252 - protein, 62 aa, Glycine max
  Clone ID: PAT_MRT3847_93285C.1.pep
PKTHSAPTKITLILCFPIMNSGIRHRKLLQLQHFSLSPFLLACLSIFPKIHELLCLSSPGVS

SEQ ID NO: 278253 - protein, 42 aa, Glycine max
  Clone ID: PAT_MRT3847_93286C.1.pep
LCARLIIYPSFSLEVHRSRTLIYAGANLYLRYQILLYFASLI

SEQ ID NO: 278254 - protein, 56 aa, Glycine max
  Clone ID: PAT_MRT3847_93287C.1.pep
VVDPFYNMSLLFNNHLFLFIKKGTAMGGTESNPPKLATKMVLNVPNITQKKQFLIK

SEQ ID NO: 278255 - protein, 76 aa, Glycine max
  Clone ID: PAT_MRT3847_93288C.1.pep
FHICADVLGLINVQLGKPPKTPCCNLIHGLADLEAAVCLCTALKANVLGINLNVPVNLSLLLNYCGKGVPKGFVCY

SEQ ID NO: 278256 - protein, 49 aa, Glycine max
  Clone ID: PAT_MRT3847_93289C.1.pep
HAHIPYLCSRLGGFDQPSGHHMSFVFLAIIYYFLPCTNIFVKSIFLVQD

SEQ ID NO: 278257 - protein, 218 aa, Glycine max
  unsure (1)..(218): unsure at all Xaa locations
  Clone ID: PAT_MRT3847_9328C.1.pep
MLLKPEKMGFFQLFMVLFGRDLNKKDFVHCLDPIIEPRFYHKWLIFVSLLVQKVLNSCARILKCIGDIFESILNPQXFLQQNFFIIVFNCIRGKQILDKNSEYYKSIVGHLDNRLELLDNSIKRDDPTKYNAALSMMASKVSYENQAYVHAAVVNRWTMELIECRDYWNDHQEKATTHAFIMLDKSEDQDTYVVALRGTEPFDADAWSTDVDISWFEI

SEQ ID NO: 278258 - protein, 131 aa, Glycine max
  Clone ID: PAT_MRT3847_93290C.1.pep
MASKAALLLCLNVLFFTVVSSTYVPCNPPPKTPKHPPVPKPPSPKLASCPKDTIKFGVCADVLGLINVQLGKPPKTPCCNLIQGLADLEAAVCLCTALKANVLGINLNVPVNLSLLLNYCGKGVPKGFVCY

SEQ ID NO: 278259 - protein, 131 aa, Glycine max
  unsure (1)..(131): unsure at all Xaa locations
  Clone ID: PAT_MRT3847_93291C.1.pep
MASKGALLLCLNILFFTVVSSTYVPCNPPPKTPKHTPVPKPPSPKQPSCPKDTIKFGVCADVLGLINVQLGKPPKTPCCNLIQGLADLEAAVCLCTALKANVLGINLNVPVKLSLLLNYCGKXVPKGFVCA

SEQ ID NO: 278260 - protein, 131 aa, Glycine max
  Clone ID: PAT_MRT3847_93292C.1.pep
MASKAALLLCFNVLFFTVVSSTYVPCNPPPKTPKHPPVPKPPSPKQASCPKDTIKFGVCADVLGLINVQLGKPPKTPCCNLIEGLADLEAAVCLCTALKANVLGINLNVPVNLSLLLNYCGKGVPKGFVCY

SEQ ID NO: 278261 - protein, 34 aa, Glycine max
  Clone ID: PAT_MRT3847_93293C.1.pep
LLINPCLTSVDLLNNLSWILQHQPFALIPELNPK

SEQ ID NO: 278262 - protein, 57 aa, Glycine max
  Clone ID: PAT_MRT3847_93294C.1.pep
SPATIVAGSVGVGVPFEVVVDNFPGTVMVSLSRSEPDNLRLGLRGRSSSRIRSFVRI

SEQ ID NO: 278263 - protein, 131 aa, Glycine max
  Clone ID: PAT_MRT3847_93295C.1.pep
MTSKGAILLCLNVLFFTVVSSTYVPCNPPPKTPKHPPVPKPPSPKQVSCPKDTVKFGVCADVLGLINVQLGKPPKTPCCSLIQGLADLEAAVCLCTALKANVLGINLNVPVNLSLLLNYCGKGVPKGFVCY

SEQ ID NO: 278264 - protein, 120 aa, Glycine max
  unsure (1)..(120): unsure at all Xaa locations
  Clone ID: PAT_MRT3847_93296C.1.pep
RGFIAAETCAPLPLRLAWCSAGPYDVSSLTGGPFGAIXHPSELAHGANNGLVIVVRLLELLKAVFPILSYADFYQLAGVVAVVVTGGPGVPFHPGREDKPGPPPEGVLPDATKGSDHLRD

SEQ ID NO: 278265 - protein, 85 aa, Glycine max
  Clone ID: PAT_MRT3847_93297C.1.pep
GLRSLLCAAEWLILCEVVDLSSVSFLAPPSSYSSPSIFCSSTRSRSLSRSQSTSRSKYICDRNSCSSTRSSRSRSTFPARAPKTW

SEQ ID NO: 278266 - protein, 91 aa, Glycine max
  Clone ID: PAT_MRT3847_93298C.1.pep
LFSRPAYHGYFVLVHKFFFLDDFTVLVHSRGGRTGGEAFLPLIQAIFVMCSRGFAFLLERAKRRNIWSPILCALGLCVGSRSFLGKVELFL

SEQ ID NO: 278267 - protein, 151 aa, Glycine max
  Clone ID: PAT_MRT3847_93299C.1.pep
MSLTQKSTHKDTFILQARLDDHHIETINMTKLDAFEELTHKSRNYLCRIRLPYEPRSNSERFFEKRRRRNKRTWGYDMNDNSLQLGHNYPSTVMMPPTGAATLPLGQTTPPIVSVTGRDTGKMIIGNVEAIKMMRRIVVGTFPRQSIQNPY

SEQ ID NO: 278268 - protein, 92 aa, Glycine max
  unsure (1)..(92): unsure at all Xaa locations
  Clone ID: PAT_MRT3847_9329C.1.pep
GASIIHIVDLIYTDVWTAGEVLRPLXYESSKILLHKSTIVILPHIRQIALESSGXIQYAGGRHPAVLRTFSQRLFLGFNDAVNGLLSSWLFT

SEQ ID NO: 278269 - protein, 74 aa, Glycine max
  unsure (1)..(74): unsure at all Xaa locations
  Clone ID: PAT_MRT3847_932C.1.pep
KLLAVSVIMCGRGIFRLDPSYDNEVSMADTRHNIPKSVKDGFIIMXPSNIHCRSCALIITDAIMKVRHSAYGKP

SEQ ID NO: 278270 - protein, 308 aa, Glycine max
  Clone ID: PAT_MRT3847_93300C.1.pep
MGTWVLQQVTSIDWNWNHESYPDFRDFSVIPFFALFFPSLRFLLDTFLFEQVARRLIFGKGHKKMDFQTLERKKKISKFKESAWKCVYFLSAEIFALAVTYDEPWFTDTRYFWVGPGNQIWPDQKIKLKLKVLYMYAAGFYTYSILALVFWETKRSDFVVSMGHHVITVILIVLSYIFRFVRVGSVVLALHDASDVFIETGKMSKYSGAETTASIAFILFVLCFTVTRIIYYPFWILRSTSYEVVHALKMDLVDGPLYYYVFNSLLYFLQVLHIYWWVLMLRMLVKQIQARGKVSEDVRSDSEDEDEH

SEQ ID NO: 278271 - protein, 80 aa, Glycine max
  unsure (1)..(80): unsure at all Xaa locations
  Clone ID: PAT_MRT3847_93301C.1.pep
YMRAXPSYHHHHXRTTTAXKRXXXMSEVXRIXVVGXGPWDXXXRKSLHXXHRRXGFTXRPSSXXXSLLFXLFLHXPFXFX

SEQ ID NO: 278272 - protein, 56 aa, Glycine max
  Clone ID: PAT_MRT3847_93302C.1.pep
GTFSCFIKHPEKNVMINQTINQTQYEFSYFNGIFNKVYIFYLILFCVSEMLYGTFY

SEQ ID NO: 278273 - protein, 38 aa, Glycine max
  Clone ID: PAT_MRT3847_93303C.1.pep
TQWVRIWTMVAGGGARVIYADTEGDLGYATELVNYAEY

SEQ ID NO: 278274 - protein, 76 aa, Glycine max
  Clone ID: PAT_MRT3847_93304C.1.pep
KVVTLGNNFLKISSGNRLQDLCNRLQALKFELKRLLTTGNRLPILCNQLHSLKFVFKFLNSCCKSFWPLVIDYILW

SEQ ID NO: 278275 - protein, 94 aa, Glycine max
  unsure (1)..(94): unsure at all Xaa locations
  Clone ID: PAT_MRT3847_93305C.1.pep
TPCCTSFFFRFFPLIRALHHKARMGSXXPYTYLPQLTLIFHPQPQPLHLNPIYFSTNTLYPLKYPPLLTPNTNSSILFYQLPYSQNFPPSFLHI

SEQ ID NO: 278276 - protein, 144 aa, Glycine max
  unsure (1)..(144): unsure at all Xaa locations
  Clone ID: PAT_MRT3847_93306C.1.pep
LSACSHCGLVTKGLHYFNLMTSVYKIVPDSGQYTCLVDLLGRRGLINEAFEFLRLMPMEAESNTLGAFIGSCNLHENIGMAKWAAEKLFIKEPEKNVNYGVMSNIYAFHRHWYDVXRVRRMMGNKCDARVPGCNWIEITNQVHS

SEQ ID NO: 278277 - protein, 203 aa, Glycine max
  unsure (1)..(203): unsure at all Xaa locations
  Clone ID: PAT_MRT3847_93307C.1.pep
LTTASNPIVKFMYEPSKSYLSLTKRRTIEHAPPNIVLPLKACIHYEENTPPMINFLEMSNSTIENPICXPYVLHLVELKGRXDLIYHQPKNKDTLHSKHSQNMGNVMVKLCTSISPYETMHDEICMXMLIVAFHRKWGANXVMESAYPIRALNRHLLRTAPCSVRILVERENLTRNNPSTSVSFYSVGIVFIEGPDDREALAY

SEQ ID NO: 278278 - protein, 101 aa, Glycine max
  unsure (1)..(101): unsure at all Xaa locations
  Clone ID: PAT_MRT3847_93308C.1.pep
LNFSLSRLXISPTFHFRFSVLFESLSQSPFQMAXVXVAQQTPXTVPXNXTXXAPKEETTEAPXXTVXKTTTXVAPEEPKXVPXRPRRWWQRXQRKRSQQKS

SEQ ID NO: 278279 - protein, 252 aa, Glycine max
  Clone ID: PAT_MRT3847_93309C.1.pep
LWHWQGYYSNFSRPCPLVGYGQPHRAPDLQKEAIYGLTEVLREEIKNARLVANPGCYPTSVQLPLVPLIKASLIELKNIIIDAKSGVSGAGRSAKENLLFTEVTEGLNSYGVTLHRHVPEIEQGLADASGSKVTVSFTPHLIPMSRGMQSTIYVEMAPGVRIEDLYQQLKLSYENEEFVFVLENGVIPRTHSVKGTNYCLINVFPDRIPGRAIIISVIDNLVKGASGQALQNLNLLMGFPENLGLHYLPLFP

SEQ ID NO: 278280 - protein, 41 aa, Glycine max
  Clone ID: PAT_MRT3847_9330C.1.pep
LIRVERKALNLVVVGSSPTVGDFVFKIFFLLNLPSLVYLSY

SEQ ID NO: 278281 - protein, 157 aa, Glycine max
  Clone ID: PAT_MRT3847_93310C.1.pep
ENLLFTEVTEGLSSRFGSRHRHVPEIEQGLADASGSKVTVSFTPHLIPMSRGMQSTIYVEMAPGVRIEDLYQQLKLSYEDEEFVVVLENGAIPRTHSVKGTNYCLINVFPDRIPGRAIIISVIDNLVKGASGQALQNLNLLMGFPENLGLHYLPLFP

SEQ ID NO: 278282 - protein, 42 aa, Glycine max
  Clone ID: PAT_MRT3847_93311C.1.pep
RNSFYEWNGTESIHRIKCTRCYDLNMISEILFTLAMDPKKKN

SEQ ID NO: 278283 - protein, 216 aa, Glycine max
  Clone ID: PAT_MRT3847_93312C.1.pep
MGLVAPYSAGTCLPSLQRLPTLQAQKWNNFSAPLSCHRQVKCAVQVQPQVAPRITPDESLQVKRRTLIGLLAFDAVLAYSSLQAAPAAENPCEFQVAPSGLAFCDKLVGAGPQAVKGQLIKAHYVGRLENGKVFDSSYNRGKPLTFRVGVGEVIKGWDEGIIGGDGVPPMLAGGKRTLKIPPELGYGSRGAGCRGGSCIIPPDSVLLFDVEFVSKA

SEQ ID NO: 278284 - protein, 79 aa, Glycine max
  Clone ID: PAT_MRT3847_93313C.1.pep
WRGYISKWTSLDIPILCRSISSRACTSPAVLRLSSPEHPPPHSLRVAPTPRVPHRQRFVRHLHHHLSLVTERERRGRNQ

SEQ ID NO: 278285 - protein, 64 aa, Glycine max
  Clone ID: PAT_MRT3847_93314C.1.pep
SFLSPAFILRLDRELKKLQNKALLSQKVVYQIEQCSTDKLRVVQQMLLQVCCQHRQVFIFPLTN

SEQ ID NO: 278286 - protein, 110 aa, Glycine max
  Clone ID: PAT_MRT3847_93315C.1.pep
MAPKIAIVYYSTYGHVKTLAEAEAEGIKAAGGQVDIYQIPETLSEEVLTKMHAPPKADHPVLNDPKTLEQYDAFLFGIPTRYGNFPAQWKTFWDRTGGQWAKGGFWGKYA

SEQ ID NO: 278287 - protein, 66 aa, Glycine max
  Clone ID: PAT_MRT3847_93316C.1.pep
SKKSASCSVVTFVSDSCVCGLTCHLKVTCIFLVEQIALMPELNILSILTSNFISQKQYLIRVRKAI

SEQ ID NO: 278288 - protein, 142 aa, Glycine max
  unsure (1)..(142): unsure at all Xaa locations
  Clone ID: PAT_MRT3847_93317C.1.pep
IGWTLADIPGISRSTCMHRINLEDRAKPIRQPQRRLNSMILDVVKNEVTKLLQARIIYPVSDSQWVSPVXVVSKKTGLTVIKNEKEELISTRVPNNXRVCIDYRKLNQVTKKDHFPLPFIDQMLERLVGKSHYWFLDGFSGY

SEQ ID NO: 278289 - protein, 211 aa, Glycine max
  Clone ID: PAT_MRT3847_93318C.1.pep
LLSKPSIAPPPAKKPVVLKDRGAAETTSVKSKEKKSPILIDKFASKKPVVDPLIAQAVLAPPKPGKAPPPGKFKDDFRKKGAMAGGPRRRILEDDAIHDEDASELNVSIPGAATARKGRKWSKASRRASRLQAARDAAPIKVEILEVGDKGMLVEELAYCLATSESEILGYLYSKGIKPDGVQTIDKDMGKMICKEYHVEVINADPFKGEG

SEQ ID NO: 278290 - protein, 72 aa, Glycine max
  Clone ID: PAT_MRT3847_93319C.1.pep
GKKPLQFIYILKKIPPPPFGLLKNKAQFRKKALIDRGFNCTTLFFLGPRSGELIFVGQVPLNNNNKFFGGGT

SEQ ID NO: 278291 - protein, 319 aa, Glycine max
  unsure (1)..(319): unsure at all Xaa locations
  Clone ID: PAT_MRT3847_9331C.1.pep
MAIAAAAVVVPLGLLFFASGLLVNLIQAICYVVVRPVSKSLYRRINRVVAELLWLELVWLIDWWAGVKVQIFTDHETFRLMGKEHALVISNHRSDIDWLVGWVSAQRSGCLGSTLAVMKKSSKFLPVIGWSMWFSEYLFLERSWAKDESTLKSGIQRLSDFPLPFWLALFVEGTRFTQAKLLAAQEYATSTGLPVPRNVLIPRTKGFVSAVSHMRSFVPAIYDVTVAIPKSSPAPTMLRLFKGQPSVVHVHIXWACLVVAGSVKFLQWSSLLSSWKGVAFSAFGLAVVTALMQILIQFSQSERSNPAKIVPAKSKNKGS

SEQ ID NO: 278292 - protein, 49 aa, Glycine max
  unsure (1)..(49): unsure at all Xaa locations
  Clone ID: PAT_MRT3847_93320C.1.pep
KAAANSNLHPLTYSFTXVVSNFKSHGSNVRDLAVLSVGYTTGFLKCSNF

SEQ ID NO: 278293 - protein, 303 aa, Glycine max
  Clone ID: PAT_MRT3847_93321C.1.pep
MHPAMYEDHVALGCHATRKLRCSERLPSFVKSRSCSCCNPCSPNGNRLTGSHIMEAEKCPLEKTTETPDVSTTITIAKPSGDESLEKQVSVGPRFQAEVPEWTGVFSESDSKWLGTHVWSLKNDTEPATATDVGRGRQEMCSCEFHGSVECVRLHIAENRMKLKLELGSEFYRLGFDRIGEEVSLQWTTEEEQRFKDIMKSNISSKNKYFWNNPSKYFPKKTRRNLVNYYFNVFLIQLRTYQNRVTPESVDSDDDEVEFGSFSDGFGMDAVKGLGDDFLECSLNKQCTDLKYTKLECKFDNWI

SEQ ID NO: 278294 - protein, 60 aa, Glycine max
  unsure (1)..(60): unsure at all Xaa locations
  Clone ID: PAT_MRT3847_93322C.1.pep
LVFFPLXVVLVVXXFLFAVPVAVSXXGXPWVRCLALXXARFPPAFXLWAPAPXVLFGRVG

SEQ ID NO: 278295 - protein, 91 aa, Glycine max
  Clone ID: PAT_MRT3847_93323C.1.pep
RSIMCWRRQGRRCRRGISSGVRWRWKGTSLCPSKGEFIFLSFFGTRSLCESHFPKTWSFLLVLISQHCCSTISVSQGHRVLIKLCLVKEKR

SEQ ID NO: 278296 - protein, 94 aa, Glycine max
  unsure (1)..(94): unsure at all Xaa locations
  Clone ID: PAT_MRT3847_93324C.1.pep
VHASGLDYMERIPLATSEGFPHVLSRKNGEKGIGRFVSGDGEEMTLSPXTSVEEAYNKLLAELEKRAPTLIGLEWPEDEMLPGRRMLDKPNTRC

SEQ ID NO: 278297 - protein, 132 aa, Glycine max
  Clone ID: PAT_MRT3847_93325C.1.pep
SNINMEKKNGNTILFFLSLCLGILTWNVRIKGFLSFLFYFKVVFIYVSQTWKAWTKTRVNNSNCEHVKQSLDYIERSARVSKEDVVLVMEKLGINAELCDDGIEEFGLKIIGELFDDEDVNLSEVEQAFDVF

SEQ ID NO: 278298 - protein, 72 aa, Glycine max
  unsure (1)..(72): unsure at all Xaa locations
  Clone ID: PAT_MRT3847_93326C.1.pep
MASSMISSPAGTTVNPAGAGMDAAWAGLNFMAAXHSKKTNSDIPSIASSGSRVHRMQVWPTTGMRKFETLYY

SEQ ID NO: 278299 - protein, 119 aa, Glycine max
  Clone ID: PAT_MRT3847_93327C.1.pep
PRVRSRVRQRLRNIIISIRYGCVARMSLSLLIRVAGSVAAYEPMVKTMAPKNESDQTICNDIDTHNLCNSICSHADDRCTTNICHSRDAVLNAYTAYTDCARRANQDDSDPEPHLLSPL

SEQ ID NO: 278300 - protein, 47 aa, Glycine max
  Clone ID: PAT_MRT3847_93328C.1.pep
EGYSRPQQLYSSARLQSWGPRLTRELFGVFICMQSSGIHKSLGVHIS

SEQ ID NO: 278301 - protein, 53 aa, Glycine max
  Clone ID: PAT_MRT3847_93329C.1.pep
TFSCSLLHYLLVAVTCCIFPPSIIMIVNSLCKLFVLTPLPHCIFIGSMCYVST

SEQ ID NO: 278302 - protein, 135 aa, Glycine max
  Clone ID: PAT_MRT3847_9332C.1.pep
KRHLMKELPETDEAVAQWCRDIFVAKDVLLDKHIAEDSFSDQDLQDTGRPIKSLLVARAWVCLVVAGSVKFLQRSSLLSSWKGVAFSAFGLAVVTALMQILIQFSQSERSNPAKIARAKSKNKGGQLEARNDKQQ

SEQ ID NO: 278303 - protein, 668 aa, Glycine max
  unsure (1)..(668): unsure at all Xaa locations
  Clone ID: PAT_MRT3847_93330C.1.pep
LTWVTMLARPVATLTDLGFLWFREFYLESSRVIQFPLECSLPWMLVDCVLESPNSGLLESVLMPFDIYNDSAQQALVLLKQRFLYDEIEAEVDHCFDIFVTKLCETIFTYYKSWAACELLDPSFLFASDNAEKYAVQPIRLNMLLKMTRVKLLGRMINLRSLITERMNKVFRENIEFLFDRFECQDLCAIVELEKLLDVLKHSHELLSRDLSVDSFSLMLNEMQENISLVSFSSRLASQIWSEMHSDFLPNFILCNTTQRFIRSSRTVPVQKPSVPFSKPSFYCGTQDLNSAHQSFARLLNGFFGTPHMFTVVRLQGSRXLPWLIRALLDHISNKITLLEPMITGLQDSLPKSIGLLPFDGGVTGCVRLVKEHLNWETKSELKAEVLHGIKEIGSVLYWMGLLDIVLREKDSMDFMQTAPWLGLLPGADGQIATSQDGGDSPVVSLFKSTAAAMVSYPGCPSPTSFHIMSKQAEAADLLYKANLNTGSVLEYALAFASAALDKYCNKWSAAPKTGFIDITISKDFYRIYSGLQIGYLEESAQVPSNSHERLGDSIAWGGCTIIYLLGQQLHFELFDFSYQILNIAEVEAASVMQTHKNSQFAVQGWEALLEAMKKARRLNNHVFSMLKARCPLEEKTACAIKQSGAPIHRIKFDNTVSAFETLPQKGS

SEQ ID NO: 278304 - protein, 63 aa, Glycine max
  Clone ID: PAT_MRT3847_93331C.1.pep
TNSQGCLKQRSTWVYHTIRQTLGEGECDKHPGLSMRLNVRDTPMKDLLLQGGGTFIKTLNPVG

SEQ ID NO: 278305 - protein, 52 aa, Glycine max
  Clone ID: PAT_MRT3847_93332C.1.pep
LVGVPCGGRGNAPTVGGSGHRTVACRKYVNVPAGVVGGKFPGPVPGVWALKG

SEQ ID NO: 278306 - protein, 45 aa, Glycine max
  unsure (1)..(45): unsure at all Xaa locations
  Clone ID: PAT_MRT3847_93333C.1.pep
YSIFGXTIYSXXIYRRIGYIRGQGARTPFMCGRIKGAKLKWIVHS

SEQ ID NO: 278307 - protein, 47 aa, Glycine max
  Clone ID: PAT_MRT3847_93334C.1.pep
ESATETETDCNSRRVVPPLHHLRQLISSLSQVHCSYTTHCSLLILHH

SEQ ID NO: 278308 - protein, 48 aa, Glycine max
  unsure (1)..(48): unsure at all Xaa locations
  Clone ID: PAT_MRT3847_93335C.1.pep
ALFGGGHGNIDQKHYGEVRHLIKYPKQKTLFPYXSVHHHFLVKININI

SEQ ID NO: 278309 - protein, 80 aa, Glycine max
  Clone ID: PAT_MRT3847_93336C.1.pep
QTGGYKLKTLLPTSKFLLPIVLRIVCPHTGLYFKRGPTEEDSREMKSDLPTPRLLMTLRDLLFLDLRPYTFLTMICIPFF

SEQ ID NO: 278310 - protein, 83 aa, Glycine max
  unsure (1)..(83): unsure at all Xaa locations
  Clone ID: PAT_MRT3847_93337C.1.pep
ESDLADPANNNYVHDVTNVVSELQSRVVTISAQVEAELTELPVEERQEYLRSLGXRESGLGNLIRATYDLLGLRTYFTSGEKE

SEQ ID NO: 278311 - protein, 83 aa, Glycine max
  Clone ID: PAT_MRT3847_93338C.1.pep
KSSLEKLSLVIPKNFFFPNIRAPKIKNKNVIFCFTSLLPAGKPSFFFFYGLGLTPPWRKTFFLLKGNFLFGAKKVLKHPFNKQ

SEQ ID NO: 278312 - protein, 156 aa, Glycine max
  unsure (1)..(156): unsure at all Xaa locations
  Clone ID: PAT_MRT3847_93339C.1.pep
ARGLGGAARVLDVNLFRAATAEDGDDGTSLSSSPNSAVSPFQMDFCTRNCNAEFGGRNKREQQEAEGRASDDDENGSTRKKLRLSKEQSAFLEESFKEHTTLNPKQKLALAKQLNLRPRQVEVCVXNRRARTKLKQTELGCEYLKKCCENLNRRRL

SEQ ID NO: 278313 - protein, 377 aa, Glycine max
  Clone ID: PAT_MRT3847_9333C.1.pep
MAIAAAAVVVPLGLLFFASGLLVNLIQAICYVVVRPVSKSLYRRINRVVAELLWLELVWLIDWWAGVKVQIFTDHETFRLMGKEHALVISNHRSDIDWLVGWVSAQRSGCLGSTLAVMKKSSKFLPVIGWSMWFSEYLFLERSWAKDESTLKSGIQRLSDFPLPFWLALFVEGTRFTQAKLLAAQEYATSTGLPVPRNVLIPRTKGFVSAVSHMRSFVPAIYDVTVAIPKSSPAPTMLRLFKGQPSVVHVHIKRHLMKELPDTDEAVAQWCRDIFVAKDALLDKHMAEGTFSDQELQDTGRPIKSLLVVISWACLVVAGSVKFLQWSSLLSSWKGVAFSAFGLAVVTALMQILIQFSQSERSNPAKIVPAKSKNKGS

SEQ ID NO: 278314 - protein, 56 aa, Glycine max
  unsure (1)..(56): unsure at all Xaa locations
  Clone ID: PAT_MRT3847_93340C.1.pep
GTSXGAXIRXSPSGRARXGSFDEDQHHDDRHILPAPPTADERAXLLSDVAEQLXIL

SEQ ID NO: 278315 - protein, 89 aa, Glycine max
  Clone ID: PAT_MRT3847_93341C.1.pep
ASDTVLRLSHRIVVVMNSTPSSVRRDCRHNIFFRCMCQTQMLSLLAPLGHQSLLLRPPRPKEFAKQICEDPKIGVKCPINISRPEEQGA

SEQ ID NO: 278316 - protein, 81 aa, Glycine max
  Clone ID: PAT_MRT3847_93342C.1.pep
YLKEFESMKEFEKRKASRNSQTKGSRRTERRENKLHQDNSSKTLNEKGTESKTPQDSRPTANNFISDSNAASENSETYENV

SEQ ID NO: 278317 - protein, 94 aa, Glycine max
  Clone ID: PAT_MRT3847_93343C.1.pep
MGAHDIEGHSSITIPIIYHSNVISHHNSPHLHTLLQHLNRLPSNHLLTLLIRIIPCYLDDHAIFYSLTIILILYSNPDLNSSFNHHCLNYQCKF

SEQ ID NO: 278318 - protein, 202 aa, Glycine max
  unsure (1)..(202): unsure at all Xaa locations
  Clone ID: PAT_MRT3847_93344C.1.pep
VEFEYNAIAKKWETIQLEELKIDRDEYLVVTCFYRXKNVLDESVVVDSPRNKFLSLIRKINPNIFIHGITNGAFNAPFFVTRFREALFHYSSLFDMLEAIVSREEWERMLIEKEIFGREALNVIACEGCERVERPETYRQWQARILRAGFLQQPFEREIVKRAIEKVTTSYHKDFVIDEDSQWLLQGWKGRIIYALSCWKPA

SEQ ID NO: 278319 - protein, 59 aa, Glycine max
  Clone ID: PAT_MRT3847_93345C.1.pep
DTKFCNLVSNCVYPCPLFSPYQSLLPRSRIRPSSMEHSSFPSLDQWYHAASALPLPGAP

SEQ ID NO: 278320 - protein, 99 aa, Glycine max
  Clone ID: PAT_MRT3847_93346C.1.pep
PPLYYFRCWVGVCTCITALTQIIKAATNLIHTIENMASYEGRPLVMEMEGEEGFEEAGSSGCGCFRCFSLKKWWQGYEEEGKGLLDQKGEGESWVGDRL

SEQ ID NO: 278321 - protein, 45 aa, Glycine max
  Clone ID: PAT_MRT3847_93347C.1.pep
KLKIFLKRYHHHLKIIHRPMRWDVPHTHRTKHVEGGNWHIPRTWI

SEQ ID NO: 278322 - protein, 150 aa, Glycine max
  Clone ID: PAT_MRT3847_93348C.1.pep
MKRSNDDVAAPVSTAKPVFLTKAQREQLALQRRHEDVADQKRRQEQLLSRNHSSDRDRDRERDRDHRDRDRDRDRDRDRDRERERERARDRDREAERRNREREREEETRSRERARLEKLVEREREKELESIKEQYLGSKKPKKRVIKPSE

SEQ ID NO: 278323 - protein, 47 aa, Glycine max
  Clone ID: PAT_MRT3847_93349C.1.pep
LLDMMSSCFSVMTMPFEIRRSIMSHFSLLHGEGYLVWDSPICHHIML

SEQ ID NO: 278324 - protein, 57 aa, Glycine max
  Clone ID: PAT_MRT3847_9334C.1.pep
VNIGLAKQQELNVGALKTFIKMVLLFQARTGRYSFWEVLTKIRACFLWKQSFGPKKG

SEQ ID NO: 278325 - protein, 159 aa, Glycine max
  Clone ID: PAT_MRT3847_93350C.1.pep
LPLLFYFLAPFLFKRTFLTKTLVGNQLEPPCLTLLFSQAGLVRWRPPPKALPNCCSQRLLNGTPLGAAPYAGALRGLPAGLPLHLPASLGPLFLPCPFRLSPSSPAISGDFLMGGFFWGSLLGLHRTSFRKYLLRRVVHVVGQRPGPWVCVLVLRPSPF

SEQ ID NO: 278326 - protein, 54 aa, Glycine max
  Clone ID: PAT_MRT3847_93351C.1.pep
LKTNHFIAFARSIHVFLKPKPNLYPLAQHFTQSHRHLSIKSNTLVEAEVARAGS

SEQ ID NO: 278327 - protein, 250 aa, Glycine max
  Clone ID: PAT_MRT3847_93352C.1.pep
SCWRRPMHKPCAVIPVYNHEAAVPAVLEAVLAAGLPCVLVDDASSPTCAAVLEQLAEREHVSLVKLPVNQGKGGAVMSGMREAARLGFSHVLQVDADGQHDLQDIAVFLDASCQHPEALICGYPQYDDSVPKGRLYARYLTHVWVWINSLSLQIRDSMCGFRVYPLPPVLALINSVKVGKRMDFDSDILVRLSWRNQPMRWLPTKVHYPLDGLSHFRMFHDNALISSMHTRLFFGMLVRLPSILWRRWRA

SEQ ID NO: 278328 - protein, 247 aa, Glycine max
  Clone ID: PAT_MRT3847_93353C.1.pep
MSLYIGNLSEHSRRDDLERVFRRFGHCNVQLKRNGYGFVVFDFPPDAEKALRALKGRNICGEPLTLTWSNKQPSTHFSRIPSGGRRNVYELQHARNPERVGYVRRRSGFSGWSNQKMGRGKSVEMPSEERGYRHDDFKDYVGEEKKFGGDFPYEGGGVVPNKEDEPVHDPLVDNGNGNAIEFDRYEPYQGNDRKHDNEDYHVGYSGGSPAAHSLENVSRAIGEDTSNRPNGSKFQQILFRCGDPGHK

SEQ ID NO: 278329 - protein, 97 aa, Glycine max
  unsure (1)..(97): unsure at all Xaa locations
  Clone ID: PAT_MRT3847_93354C.1.pep
TPYQYALQAFIRYGSKLLXIDXQINARSSDPSLINLCGSVQLPNPLVHSSSDQGLAFIGILSQYLYLHGERSGSPYYGARLNNIVSRHVYASLRPVL

SEQ ID NO: 278330 - protein, 57 aa, Glycine max
  Clone ID: PAT_MRT3847_93355C.1.pep
QIDGNLLPTIKFIDPLKIPNIPAPLGGCFFFGNHPAILPYGVLSHSKRAKKKIYDNL

SEQ ID NO: 278331 - protein, 97 aa, Glycine max
  unsure (1)..(97): unsure at all Xaa locations
  Clone ID: PAT_MRT3847_93356C.1.pep
MVYVKAQKSKAYFKRYQVKFKRRREGKTDYRARIRLINQDMNKYNTPKYRFVVRFSNTDIXAQIIFASIAGDLVFATAYSHVLPRYGFEVSTYKILQ

SEQ ID NO: 278332 - protein, 96 aa, Glycine max
  Clone ID: PAT_MRT3847_93357C.1.pep
KEETTLFSLFLPTLYLKKTFFSKGFRTKGWQRFDKLKGFFRPNPPWPKMVQPIKQGPLKTIFLKKESLILLKLRYFEPLSLKGGLIPFKVTLPLLE

SEQ ID NO: 278333 - protein, 133 aa, Glycine max
  Clone ID: PAT_MRT3847_93358C.1.pep
MQSSKEKMKNMASAAKEQVDIYKAKIDEKAEKATARTEEERVIAHEHAKAKEAGAKMELHEAKARHAAEKLSANQSHYGLHHGHNNPPLVGTTQTHYQQGHQHQPLGAVPMPGTTYPSYPLGGNPNPPRNKHI

SEQ ID NO: 278334 - protein, 61 aa, Glycine max
  Clone ID: PAT_MRT3847_93359C.1.pep
YTEDDVVSSDLVGDNHSSIFDAKAGIPLNSKFVKLISWYDNEYGYSSRVIDLIKYIQTKDP

SEQ ID NO: 278335 - protein, 189 aa, Glycine max
  Clone ID: PAT_MRT3847_9335C.1.pep
MASTDVRDILTAFNPSLDFFAITAGDGRVKIWDTLRGQVHTEFADITSTHSTATTLHHKSSINGHLALDYTCIKWFSFDKKRKRKHISSLLVLGTGGGDVLALDIASGQLTWRLTDCHPGGVRAIASSANVSTIYTAGADGMVCLIDFMTGNLLEKFKASTKPVSCMSVSPDGKTLATAAAQLKIFNCS

SEQ ID NO: 278336 - protein, 166 aa, Glycine max
  unsure (1)..(166): unsure at all Xaa locations
  Clone ID: PAT_MRT3847_93360C.1.pep
SGKTEDERSSNLHEASLLLLDVGPSMHPALSEIEKVCSMLVQKKLIYSKYDEAGIVLFGTEDTNNELTTEVGGYQHVVILKNTXVVDGDIVEALHXLPPGTTDGDYLDADIRGNDMLVKIFGVTNKGKKRXCLIRNRKCRIKEFDERTKEEQVTTIAKQMTAHGIK

SEQ ID NO: 278337 - protein, 80 aa, Glycine max
  Clone ID: PAT_MRT3847_93361C.1.pep
ALMANFIIIPMIILMLSHFYAFIIVIAIFIDFKLLLVMIVLDEIDFDVIDDWLWFGCHAYGCFENVLCMFNCPPYEMIQS

SEQ ID NO: 278338 - protein, 44 aa, Glycine max
  unsure (1)..(44): unsure at all Xaa locations
  Clone ID: PAT_MRT3847_93362C.1.pep
QTRXPRSIYCDLNSRSNPLDPQKPNLLPRGLTAHVSISSGSLHI

SEQ ID NO: 278339 - protein, 131 aa, Glycine max
  unsure (1)..(131): unsure at all Xaa locations
  Clone ID: PAT_MRT3847_93363C.1.pep
DXKISRYIHWTFVNYLGRRLRIWGIKMIFWGNVPQHPSLQWNLELELETSIFFCNDPIVPWWNEWDSDHLKGILTRFGANRTDVSNWGIFRLGNEDGEPFCFHGDIDHWTYTWFTAPSWWCYRNIPPEGSS

SEQ ID NO: 278340 - protein, 58 aa, Glycine max
  unsure (1)..(58): unsure at all Xaa locations
  Clone ID: PAT_MRT3847_93364C.1.pep
FNCMHKLQYTRDAXFKFITFPLKDGTNGENYFAMDVKLIRTCHLGAFLTTSPQGSATL

SEQ ID NO: 278341 - protein, 117 aa, Glycine max
  Clone ID: PAT_MRT3847_93365C.1.pep
MGKGGGCFPSKTKAPISGAQKDPVSVESLIPRDDPSNTSQEVPAPAPEAVKKLKVFIVFYSTYGHVESLARSLKKGVDSIEGVEGVLYRVLETLPKEVLELMKAPEKDETVPLISAD

SEQ ID NO: 278342 - protein, 80 aa, Glycine max
  unsure (1)..(80): unsure at all Xaa locations
  Clone ID: PAT_MRT3847_93366C.1.pep
SIPKPTFSATKSEVYGANRPTYRPQPXHHRRRRSRGCASTPCCWLLLILLCLLLLVSAGGTELYFLYRSQRPTMFRYLPK

SEQ ID NO: 278343 - protein, 317 aa, Glycine max
  Clone ID: PAT_MRT3847_93367C.1.pep
PTRPLNGDLLEGQNSAIAGQIKDFNRRLRGMIEGQRLFPAQILELQDRLSATLEEFQKQLELMVKYDWDFDHYLEEDLPAAMEYIRAQCQPRDGKLLAIGHSMGGILLYAKLSSCCFDGKDSGLASVGTLASSLDYTPSRSSLKLLLPLAEPTRALNIPVIPVGPLMATVHPLASYPPYVFSWLNSQISAQDMMDQNLFEKLVLNNFDTVPSKLLLQLSSVFQKGGLRDRSGTFFYKDHLHKSNVPVLAIAGDRDLICPPEAVYETVKLIPEELVTYKVFGEPGGPHYAHYDLVGGRLAADQLYPCITEFLIHHDIV

SEQ ID NO: 278344 - protein, 51 aa, Glycine max
  Clone ID: PAT_MRT3847_93368C.1.pep
MDEVVYFLMKHIYGVLCQIPTIKDMQEVSSHFISSLMLFNSVYILTTIFEF

SEQ ID NO: 278345 - protein, 216 aa, Glycine max
  unsure (1)..(216): unsure at all Xaa locations
  Clone ID: PAT_MRT3847_93369C.1.pep
MQTFFLYLFLFFLLCALHQLASSQPFFLNRRILHEPFVPLTTLPPSEAPKPQPSPSSHKQKPKPKYPSSTIPTTSTTTTTIPTPTTTTPQSPFFPLYPSSPPPPSPITFASFPANISSLILPHSPKPNSSSNKLLPVALSAVAAAVLAIIISAVVCYRRRRSPPLAADGKLNPIRHRPPPAPAQYRNRRGNSQXRHTSSTSSEFLYLGTVVNSHII

SEQ ID NO: 278346 - protein, 139 aa, Glycine max
  unsure (1)..(139): unsure at all Xaa locations
  Clone ID: PAT_MRT3847_9336C.1.pep
MAREKIPDERLHTGHKMAVMGMGTSVENRASDETLGCIYVEAIDAGYRHHDTADAYGTEEALGHAVADSHMTIGPXLTRLDDRKFFITNXRPWNTDAHRDTVVPVLKTTXKKVGTEYVDXLYLTHWPVRLTHEPENATV

SEQ ID NO: 278347 - protein, 37 aa, Glycine max
  Clone ID: PAT_MRT3847_93370C.1.pep
TGVLSDFDSPILFYSDELMGPILHIGDKDRGASLLCP

SEQ ID NO: 278348 - protein, 69 aa, Glycine max
  unsure (1)..(69): unsure at all Xaa locations
  Clone ID: PAT_MRT3847_93371C.1.pep
MYYLKGKDHDLLIDNAAGIGSAGRGVVAADEXSTGTLVKRVLSMIVENIEFNRPALTELLLTAPGALQY

SEQ ID NO: 278349 - protein, 202 aa, Glycine max
  Clone ID: PAT_MRT3847_93372C.1.pep
MPGIYVNILCCLLPLPLVLPPCGPPLPGSPPPPPPPPLPVQEAVDMECSGQSLLYQWQGNLCKSGVNYCTIYACKADSNICRYSNAIPEPAEWPSKLDMTKRTDLRHVKSTFAATPSHRREVCRLIPSSSSDHKRFQDFISYLKQRDCAGVIKIPASKSIWARLLFILPHSLETCSLLSIAHDPSDCLIALVLPKETNFEWI

SEQ ID NO: 278350 - protein, 47 aa, Glycine max
  Clone ID: PAT_MRT3847_93373C.1.pep
ALIFFGQFLLWRGWFKAIKLILIWLSNPYSLINKIRKGLLLLTVNMI

SEQ ID NO: 278351 - protein, 66 aa, Glycine max
  Clone ID: PAT_MRT3847_93374C.1.pep
DPPGLEQANGERHKREAYSQDYRVVAEKTAPDDAAKDRKDSETVSSTYESSEGSRLKMDNTTCGDC

SEQ ID NO: 278352 - protein, 266 aa, Glycine max
  Clone ID: PAT_MRT3847_93375C.1.pep
MNLSYLTRFPERLVAPLYATLPTTATTSGNRPENFAIEGRNLKFSFTTRQTQDVPVLKDCSIRIPCGQFWMLLGPNGCGKSTLLKILAGLLTPTSGTVYVNGPKSFVFQNPDHQVVMPTVDSDVAFGLGKINLAHDEVRSRVSRALHAVGLSDYMKRSVQTLSGGQKQRVAIAGALAEACKVLLLDELTTFLDEADQVGVIKAVRNSVDTSAEVTALWVTHRLEELEYADGAIYMEDGKVVMHGDAASIRSFIEARQSAYITQINS

SEQ ID NO: 278353 - protein, 47 aa, Glycine max
  Clone ID: PAT_MRT3847_93376C.1.pep
SLKINKFIIDYCNKSGIPLRKKQQEQHNQKHGDIKTQPMDKIKKIGN

SEQ ID NO: 278354 - protein, 82 aa, Glycine max
  Clone ID: PAT_MRT3847_93377C.1.pep
DYGNMILILSEADSVLGIFFSFSYLFFKPFFLEGNFLWEEKKRKNFCFVCFKNPMNLRVIPCGYICNFPRVLFFLFLWIHFS

SEQ ID NO: 278355 - protein, 124 aa, Glycine max
  Clone ID: PAT_MRT3847_93378C.1.pep
MRSSNAPGREDKPEPPPEGRLPDATKGSDHLRDVFGKAMGLSDRDIVALSGGHTIGAAHKERSGFEGPWTSNPLIFDNSYFKELLSGEKEGLLQLPSDKALLSDPVFRPLVEKYASDEDAFFAD

SEQ ID NO: 278356 - protein, 329 aa, Glycine max
  unsure (1)..(329): unsure at all Xaa locations
  Clone ID: PAT_MRT3847_93379C.1.pep
MGKSYPTVSADYQKAVEKAKKKLRGFIAEKRCAPLMLRLAWHSAGTFDKGTKTGGPFGTIKHPAELAHSANNGLDIAVRLLEPLKAEFPILSYADFYQLAGVVAVEVTGGPEVPFHPGREDKPEPPPEGRLPDATKGSDHLRDVFGKAMGLTDQDIVALSGXHTIVCYDFEFVVLATLQNYAAIILRKNVTSKLLYHYWCNFAKCILXGAAHKERSGFEGPXTSNPLIFDNSYFTWVFSRIQHGLLNTLLLLLYYLKFPFXFFIYVLNFFRELLSGEKEGLLQLPSDKALLSDPVFRPLVDKYAADEDAFFADYAEAHQKLSELGFADA

SEQ ID NO: 278357 - protein, 65 aa, Glycine max
  Clone ID: PAT_MRT3847_9337C.1.pep
RLSGSRQLHKAPAILTKRLNLGLCSLYFYDNYACIFHTNREDMTKCIEQNWKRAINALDKIRHPK

SEQ ID NO: 278358 - protein, 56 aa, Glycine max
  Clone ID: PAT_MRT3847_93380C.1.pep
NQCTLPDNIHPFTTIFFPTPILIYVSTIYLTTTFLSFTISMPIMIATTSFQKITHP

SEQ ID NO: 278359 - protein, 221 aa, Glycine max
  Clone ID: PAT_MRT3847_93381C.1.pep
RRPSFSFGTRRHEASCRIRHEAKTGGPFGTVKDPSELAHGANNGLDIAVRLLEPLKAEFPILSYADFYQLAGVVAVEVTGGPEVPFLPGTKDKPEPPPEGRLPDATKGSDHLRDVFGKAMGLNDRDIVALSGGHTIGAAHKERSGFEGPWTSNPLIFDNSYFKELLSGEKEGLLQLPSDKALLSDPVFRPLVEKYASDEDAFFADYAEAHQKLSELGFAEA

SEQ ID NO: 278360 - protein, 70 aa, Glycine max
  unsure (1)..(70): unsure at all Xaa locations
  Clone ID: PAT_MRT3847_93382C.1.pep
FFFFLGFFLVFFFGGPKGXXEHLKGCSQLCDPWPESGGRTNFLEQTKFWGAPLIKHVFKRVLFCSWVASY

SEQ ID NO: 278361 - protein, 63 aa, Glycine max
  Clone ID: PAT_MRT3847_93383C.1.pep
FKPCSILHSQFTIRILASILHYFLALSLSCSILFYLSDSVTPTKPIYLDVLPVQNDRSTRLNN

SEQ ID NO: 278362 - protein, 176 aa, Glycine max
  Clone ID: PAT_MRT3847_93384C.1.pep
MMISGGGGGGGKSSWSSSTSSWVPTTSVSASGKRIQREMVELNNDPPPDCSAGPKGDNLYHWIATIIGTPETPYQGGIFFLDIKFPIDYPFKPPEVVFKTRIYHCNVDPDGRVSMGILKDDWSPALTITKVLLEVRSIMTNPDPYNAVVPGIAHLYSGDRAKHDDIAAEWTVRFAK

SEQ ID NO: 278363 - protein, 110 aa, Glycine max
  unsure (1)..(110): unsure at all Xaa locations
  Clone ID: PAT_MRT3847_93385C.1.pep
VAHMETFGTESKEKEKSIWAFRKAFKVQNMPPGSIVLYEQSPTGTLGISFXKHESSRRHEHAVVVTNTLWEAVLENMIGEIPVSPALKESLATRFPQFFKELEANPNNEN

SEQ ID NO: 278364 - protein, 101 aa, Glycine max
  Clone ID: PAT_MRT3847_93386C.1.pep
RDYDLYKGPSVDVDTTEWSGRSLHARSSVTTDPIESGLTVSPDHPVNHNRLPYSGITYTSGTIFLNMPDIGEHTFIIDDSNGPHWKMTRTNGLINIRPANN

SEQ ID NO: 278365 - protein, 81 aa, Glycine max
  Clone ID: PAT_MRT3847_93387C.1.pep
RAGSWTGFVFSGVSWRRIVSLVTFSLAINDKEVTYQYETLKAGTVTMLVINPSGFVQRLLWSERTGNWEILSTRPMDQWEY

SEQ ID NO: 278366 - protein, 60 aa, Glycine max
  Clone ID: PAT_MRT3847_93388C.1.pep
PGQAERLLLQRSDHDLAWQTNLMLLEPLGCGMLKQSLMNYARSAIHLLMMAVTIITDTDS

SEQ ID NO: 278367 - protein, 38 aa, Glycine max
  unsure (1)..(38): unsure at all Xaa locations
  Clone ID: PAT_MRT3847_93389C.1.pep
XTSDRKSNMSLDNQHYYYIIIEMLIIIILVYSILYSVV

SEQ ID NO: 278368 - protein, 222 aa, Glycine max
  unsure (1)..(222): unsure at all Xaa locations
  Clone ID: PAT_MRT3847_9338C.1.pep
MEGLSSEVGSLPDSCIAIHDDPLAFVHSAIHHSPIQLEFWLNAGIVSTNCGWIVGWLAGWLAGWLAGWMPWMCPCPNEEEERNMKHYAALLTGRTSYFLKGEEMKSMYTTYNPQNVVATARFLFHKKNLYYSFYTSSRIGRPRAIQFVDDAGVILEEHQLETTLAGTLSVYQNATGKICGVWRRVPRDYKRILRDDRLHVVLLWGNKQQAELAXAGKGAKYT

SEQ ID NO: 278369 - protein, 243 aa, Glycine max
  unsure (1)..(243): unsure at all Xaa locations
  Clone ID: PAT_MRT3847_93390C.1.pep
TRPRLSDKGVKAQVLTVDSLSLTTRVCREVGIRTTHVITGPELEQRXTKTLSMRQIIEPHXLARLTPIQKQRVEQSLQTIGNHVVGFLRDGVNDSLALYAANVSISVDSSVAIAKDMADIILLEKDLNVLGAGVEHGRLSYGNTMKYLKMSEIANLGSVISLLIATLAFKYEPLTSNSVITQNFIYSVGQIALAWDKMDEEYVKTPHKSSXRGLSMFMXWNAPXCTLCDVAHFSFFGFITGYT

SEQ ID NO: 278370 - protein, 158 aa, Glycine max
  Clone ID: PAT_MRT3847_93391C.1.pep
RNSMEIFNLITLAMTIFLALVPKMESHIRTPGMPMPKTPRPLCASQFALVNYACSRLPFSLGVPPDSPSTPPSPNDEEGHRNNHHNGSHRHGHRHGHKHRNHQTADEDNCCRWAKEVDNQCVCELLLRLPPFLIRPLHQYTLNVGESCDITYSCGAPI

SEQ ID NO: 278371 - protein, 263 aa, Glycine max
  Clone ID: PAT_MRT3847_93392C.1.pep
MANFTSSSSSSCSPLPLSLTMSHISPPSSSAAFDDSSEDACSICLEPFSTHDPATITSCKHEYHLHCILEWLQRSKECPICWQLLILKDPASQELLNAVEAEKRLSSRTVYSHAFTDSRSPLHRLNNDQDDSDFDEQLTQHLVSAASRARYICRGERQRSPGAGPSEVLVFNSSMHASGMQSTLTTSPSSGVPSTSAFSSVGMVTTNTSSESDMPCKPRVIYSQPSPEKCRRLNTSEIFSFPESFKSKLSAASARCKESISKI

SEQ ID NO: 278372 - protein, 145 aa, Glycine max
  Clone ID: PAT_MRT3847_93393C.1.pep
STHASATTQNLQNSAKRSCTKVHKQGSLVGRAIDLSRLSGYNDLLSELERLFSMEGLLKDPDKGWKILYTDSENDIMVVGDDPWHEFCDVVSKIHIYTQEEVEKMTIEMISDDTHSCLEEAPVIMEASKSSSVGQPDYSPTAVRV

SEQ ID NO: 278373 - protein, 88 aa, Glycine max
  Clone ID: PAT_MRT3847_93394C.1.pep
NWFKARHCKEITSPVVRFSFWSNPSEFKKVSSSYYCPVSNVHFKSLLVLRMKLQTAISVVCCTLEIIVAPWFPYNPRDVLDRILFTCN

SEQ ID NO: 278374 - protein, 374 aa, Glycine max
  unsure (1)..(374): unsure at all Xaa locations
  Clone ID: PAT_MRT3847_93395C.1.pep
MKIYILLVITSFTFGFLEKVVSNPSSRPYKAIFNLGDSLSDTGNFLASGAILFPVIGKPPYGQTFFKRATGRCSDGRLMIDFIAEAYELPYLPPYLALTKDKDIQRGVNFAVAGATALDAKFFIEAGLAKYLWTNNSLSIQLGWFKKLKPSLCTTKQDCDSYFKRSLFLVGEIGGNDYNYAAIAGNITQLQATVPPVVEAITAAINELIAEGARELLVPGNFPIGCSALYLTLFRSENKEDYDDSGCLKTFNGFAEYHNKELKLALETLRKKNPHARILYADYYGAAKRFFHAPGHHGFTNGALRACCGGGGPYNFNISARCGHTGSKACADPSTYANWDGIHLTEAXYRYIAKGLIYGPFSYPPLKISPNKIA

SEQ ID NO: 278375 - protein, 46 aa, Glycine max
  Clone ID: PAT_MRT3847_93396C.1.pep
LQTAIEAYYFQSLPKSPTDLIVQTDILNNTTLQPIDDSTVILQHHQ

SEQ ID NO: 278376 - protein, 96 aa, Glycine max
  unsure (1)..(96): unsure at all Xaa locations
  Clone ID: PAT_MRT3847_93397C.1.pep
GGIVGVNQKNXGRAGSKCWLGKRPVVRGVVMNPVDHPHGGGEGRAPIGRKKPATPWGFPALEIKKKKKGPNEFNTKAQNMYKRMQRPWLFYGVTLS

SEQ ID NO: 278377 - protein, 33 aa, Glycine max
  Clone ID: PAT_MRT3847_93398C.1.pep
CFNFVTKYLLSLFCFNGLGKRYSRHLIYCVSSL

SEQ ID NO: 278378 - protein, 38 aa, Glycine max
  Clone ID: PAT_MRT3847_93399C.1.pep
WILPPLSTVHGPRNFYGSCAHIPRLEFSFLLSHNKWMT

SEQ ID NO: 278379 - protein, 227 aa, Glycine max
  Clone ID: PAT_MRT3847_9339C.1.pep
MEGLSSEVGSLPDSCIAIHDDPLAFVHSAIHHSPIQLEFWLNAGIVSTNCGWIVGWLAGWLAGWLAGWMHHLILYLDSLHLSDTDVALDVPVPNEEEERNMKHYAALLTGRTSYFLKGEEMKSMYTTYNPQNVVATARFLFHKKNLYYSFYTSSRIGRPRAIQFVDDAGVILEEHQLETTLAGTLSVYQNATGKICGVWRRVPRDYKRIMRNDRLHVVLLWGNKQQA

SEQ ID NO: 278380 - protein, 45 aa, Glycine max
  Clone ID: PAT_MRT3847_933C.1.pep
AKLLTNRRDQLLFFYSKKFNYTCSFTREKTLTPIICLISNIQIYR

SEQ ID NO: 278381 - protein, 96 aa, Glycine max
  Clone ID: PAT_MRT3847_93400C.1.pep
VFITVAKIISCLIHKILEQYIRLFYHHREYLLDLEYMPNGSLESHLLGDKKTLPCDVKYKVASCLDQAIGHMLEDSQQGALHKDLKSDHVILHTAL

SEQ ID NO: 278382 - protein, 45 aa, Glycine max
  Clone ID: PAT_MRT3847_93401C.1.pep
LYTISSPYYYVLKHLRKCYNRRHPTDLKLELNRFYMGPSCQPVRN

SEQ ID NO: 278383 - protein, 55 aa, Glycine max
  Clone ID: PAT_MRT3847_93402C.1.pep
RPFFFFLFQTIWAIFLNHHPHHERLCLKAWSRKLHPPIAILPILRRTTQYTKPPP

SEQ ID NO: 278384 - protein, 90 aa, Glycine max
  Clone ID: PAT_MRT3847_93403C.1.pep
YIKCTIHQHKTHKVKHSYVTKLKKKKESHTSLNEKQFYSNYNNLHIQKADKMGFVANLGQEYFFIMNDVFLPENTALKKKKKITLLIINR

SEQ ID NO: 278385 - protein, 155 aa, Glycine max
  Clone ID: PAT_MRT3847_93404C.1.pep
MRNQDDVVNSIRAMLEKAEAPVTDECCIYRVPFDIRKLNEDAYTPKVVSIGPFHHKGNPRLQNMEKHKLIYCNAFLKRSNTGLETWIRYIQDVEPRFRSCYSDALEFTKEELLKIILVDSGFIFELFWLTYYEENSGNNGSILLKPWLTTNVRLD

SEQ ID NO: 278386 - protein, 44 aa, Glycine max
  Clone ID: PAT_MRT3847_93405C.1.pep
QNQTMITQRLNHLLHSLFLFAAAFSILNTTYIFANGGYAGNGSS

SEQ ID NO: 278387 - protein, 86 aa, Glycine max
  unsure (1)..(86): unsure at all Xaa locations
  Clone ID: PAT_MRT3847_93406C.1.pep
AMAPFKEDGVSVMGSGRAVYNLKAPEPLPTVGPRALERYNWVKNXLLXGRYSDVNPYXQKAPHAKKAHPWPGHFEPLPGDKGGSGK

SEQ ID NO: 278388 - protein, 40 aa, Glycine max
  Clone ID: PAT_MRT3847_93407C.1.pep
MKRQKNVNYSYICIRIQSSHNNSTKSTRLPVPLTQNSTKK

SEQ ID NO: 278389 - protein, 94 aa, Glycine max
  Clone ID: PAT_MRT3847_93408C.1.pep
IFQVSSGPGFYCTPGPLELKMKGLFLRFFGCGGTLRHSCDRKLIFRPAHKGESIFFFWKWEYKTCTKLLLHGKLVEVNTSPQKLNNPFPLSSPF

SEQ ID NO: 278390 - protein, 37 aa, Glycine max
  Clone ID: PAT_MRT3847_93409C.1.pep
YSNTTRVRKPQYPPMLDTKLGKTCLPQGTSRSVKGVP

SEQ ID NO: 278391 - protein, 310 aa, Glycine max
  unsure (1)..(310): unsure at all Xaa locations
  Clone ID: PAT_MRT3847_9340C.1.pep
VILAADLSPAEAGDRVPVNAKMVKSRSTTGAVYRSFTSTXLDPVTKNEFEYVNVEMNPKKKGYVQLHTTHGDLNIELHXDIAPRACENFITLCERGYYNGVAFHRNIRNFMIQGGDPTGTGRGGESIWGKPFKDELNSKLVHSGRGVVSMANSGPHTNGSQFFILYKSANHLNFKHTVFGGVVGGLTTLSVMEKVPVDDDDRPLEEIKITSVTIFVNPYTEPDEGEEQDNAKEKNAEDEDNGKVGSWYSNPGAATSESGGTGVGGGVGKYLKARSAQAKSATVDNTGTDVVVKKRKVGVASSEFKDFSAW

SEQ ID NO: 278392 - protein, 67 aa, Glycine max
  Clone ID: PAT_MRT3847_93410C.1.pep
GEESWLATNINRAHLNYYYALLTCIGLINYLYFLAISCAYGPPPGQTLGASAGKEEEKFDYRELHTS

SEQ ID NO: 278393 - protein, 52 aa, Glycine max
  Clone ID: PAT_MRT3847_93411C.1.pep
FFNSFYTCSSAKLNPTTDSRSLSMPVTCTDYIHRKTWKYYPKTQNPVMVVFI

SEQ ID NO: 278394 - protein, 264 aa, Glycine max
  unsure (1)..(264): unsure at all Xaa locations
  Clone ID: PAT_MRT3847_93412C.1.pep
TAPDILTILDSMPKTNHKYDPXSQRDSNLSSDDAFAKLYASVDADIEALLQKADTASKEKSKASTVAINAEIRRTKARLLEEVPKLQRLAMKKVKGLSSQEFAARNDLALALPDRIQAIPDGTPAASKQSGSWAASASRPGIKFDSDGKFDDEYFQQTEESSGFRKEYEMRKMKQDQGLDMIAEGLDTLKNMAHDMNEELDRQVPLMDEIDTKVDRASSDLKNTNVRLRDTVNQLRSSRNFCIDIVLLIIILGIAAYLYNVLKK

SEQ ID NO: 278395 - protein, 78 aa, Glycine max
  unsure (1)..(78): unsure at all Xaa locations
  Clone ID: PAT_MRT3847_93413C.1.pep
MGKTXVXFFASRGKWAKKRXVGSXSFGQXGEKPXPETKVSVXDGKVLEKXLSVAGXGLDASXCXEXPAEAPXXGSGNS

SEQ ID NO: 278396 - protein, 76 aa, Glycine max
  Clone ID: PAT_MRT3847_93414C.1.pep
ANGRKLIWGGPPPRVCERPRKVRETHEGSIIQKEKAPLFFGGEKKGLNLRVPGTKWKAQNSEDGGGNPKHGGSHVI

SEQ ID NO: 278397 - protein, 61 aa, Glycine max
  unsure (1)..(61): unsure at all Xaa locations
  Clone ID: PAT_MRT3847_93415C.1.pep
MPSRTLRRRPHHGDAEGKRQEHSETSGXDSTREPLLADDDYIENKKICTSEDLWEEERKKA

SEQ ID NO: 278398 - protein, 66 aa, Glycine max
  Clone ID: PAT_MRT3847_93416C.1.pep
FSEMVSKQPSPGPPDNNLTCLTFFQKGSDSAQLGKLALGNNDFTFVVFIYAKKHGHHTLIYSLLKC

SEQ ID NO: 278399 - protein, 102 aa, Glycine max
  unsure (1)..(102): unsure at all Xaa locations
  Clone ID: PAT_MRT3847_93417C.1.pep
WYKKQKDLPGSERGGFTLILHSGNPDNLMNESPTVIVDPFSSRLDLGYILLDPPWAXFVQWLEKATIEEEYVLMAEPDHIFGTPLPNLAHGGYPGALLFLYI

SEQ ID NO: 278400 - protein, 62 aa, Glycine max
  Clone ID: PAT_MRT3847_93418C.1.pep
VILFSQPDHFFKALRCLKHIFSCWGFCHYFMPGDPLPPSGYIEIRSAQHKRDANQVPLFRGI

SEQ ID NO: 278401 - protein, 172 aa, Glycine max
  unsure (1)..(172): unsure at all Xaa locations
  Clone ID: PAT_MRT3847_93419C.1.pep
TCSLYPDLLTGDEXLLSDSFRYNAIDTGMLGEAEVKWCVKGTDDRDIGADPXAEGGGQYEGVLDAPVKVXVEFVDTFILQEQPEFDKKQYDTFMRRVIKNMTPKLDAEQQELFKKHIAGATXKHLLSKIKDFQLFVGESMADDACLVLAYYKDGAADPTFLYFAYALKEVKC

SEQ ID NO: 278402 - protein, 254 aa, Glycine max
  Clone ID: PAT_MRT3847_9341C.1.pep
MEGLSSEVGSLPDSCIAIHDDPLAFVHSAIHHSPIQLEFWLNAGIVSTNCGWIVGWLAGWLAGWLAGWMVNGWRRSYLIAQHHLILYLYSLHLSDTDVALDVPVPNEEEERNMKHYAALLTGRTSYFLKGEEMKSMYTTYNPQNVVATARFLFHKKNLYYSFYTSSRIGRPRAIQFVDDAGVILEEHQLETTLAGTLSVYQNATGKICGVWRRVPRDYKRILRDDRLHVVLLWGNKQQAELALAGKVAKYTALQ

SEQ ID NO: 278403 - protein, 63 aa, Glycine max
  Clone ID: PAT_MRT3847_93420C.1.pep
AVDAEKEVVVVPELPPFDYSPPPYVGPTAEEILAKRREYLSPSILHSYKNPVSPRCTRLFSDK

SEQ ID NO: 278404 - protein, 223 aa, Glycine max
  Clone ID: PAT_MRT3847_93421C.1.pep
METGGFHGYRKLPNTTSGLKLSVSDMNMNMRQQQVASSDQNCSNHSAAGEENECTVREQDRFMPIANVIRIMRKILPPHAKISDDAKETIQECVSEYISFITGEANERCQREQRKTITAEDVLWAMSKLGFDDYIEPLTMYLHRYRELEGDRTSMRGEPLGKRTVEYATLATAFVPPPFHHHNGYFGAAMPMGTYVRETPPNAASSHHHHGISNAHEPNARSI

SEQ ID NO: 278405 - protein, 227 aa, Glycine max
  unsure (1)..(227): unsure at all Xaa locations
  Clone ID: PAT_MRT3847_93422C.1.pep
METGGFHGYRKLPNTTAGLKLSVSDMNMRQQVASSDHSAATGEENECTVREQDRFMPIANVIRIMRKILPPHAKISDDAKETIQECVSEYISFITGEANERCQREQRKTITAEDVLWAMSKLGFDDYIEPXLTMYFPRYRELEGDRTSMRGEPLGKRTVEYATLGVATAFVPPPYHHHNGYFGAAMPMGTYVREAPPNTASSNHHHHHHHHHARGISNAHEPNARSI

SEQ ID NO: 278406 - protein, 52 aa, Glycine max
  Clone ID: PAT_MRT3847_93423C.1.pep
NSRVNAPLLIYRYSHFRGTFSCNMYHKTTKHILHIIMALDNGLIISSAITSE

SEQ ID NO: 278407 - protein, 174 aa, Glycine max
  Clone ID: PAT_MRT3847_93424C.1.pep
VLPPPGFSAAKLDSSEASGRPYSSTFGNMHSGLSEVEMLRNDSMHRSSTTEAENRFLESLMSGSKSSSPLSSLTLSEGLQGFLGNDSGNLGPSGVDSGINLYLLAKRMALERQRSLPNAYPYWPGRDAAPLPPKSDIFPDASPHSNMLSSLSDNSRLLQSQSPELMSIIQGLSD

SEQ ID NO: 278408 - protein, 78 aa, Glycine max
  Clone ID: PAT_MRT3847_93425C.1.pep
NFVISLRPHDLLLGLPPYDLPTHTCCFSLFFKVFPLQQYRSPPIAFSYYFCTAYLYLSAPPPPQRRRTSYSEDGKPSW

SEQ ID NO: 278409 - protein, 269 aa, Glycine max
  Clone ID: PAT_MRT3847_93426C.1.pep
WQGTEAIRSIRADLSVFLKLKFSPHIFTKMSKLQFLSFTNKHDEDDIEFLPNGLQSFPDELRYLHWRYYPLKSLPENFSAEKLVILDMSNSQLEKLWDGVQNLVNLREVKVCDSKNLKELPDLTQATNLEELDISACPQLTSVNPSIFSLNKLQRLNIGYCYITKVVSNNHLSSLRYLSLGSCPNLEEFSVTSENMIELDLSYTRVNALPSSFGRQSKLKLLRLGSTDIKKLPSSFKNLTALQYLSVELSRQLHTLTELPPSLETLDAL

SEQ ID NO: 278410 - protein, 153 aa, Glycine max
  Clone ID: PAT_MRT3847_93427C.1.pep
HNWVYIDQCNELFPILLTHSPATNYSHALQFHTQITKQNSHILSFITCTCHTNQIFLSVTATTVTSPNTHQQFSLTSITHTIPVSLYSGHSLHTSSLLFLKTHSSRHNSSCSTEVGKMIRVPNITKSFFPPIVKPKCKKLRISTLGNKLLGLS

SEQ ID NO: 278411 - protein, 44 aa, Glycine max
  Clone ID: PAT_MRT3847_93428C.1.pep
QIKKYDIYMLSILINSECQTESGNVQYHHSNTYITQYFELDSIL

SEQ ID NO: 278412 - protein, 58 aa, Glycine max
  Clone ID: PAT_MRT3847_93429C.1.pep
VSKYNLHLQDCLNILSCIFHFQIELRPLVAKSLQSFWFQWARISEILNDIIKHKLIIY

SEQ ID NO: 278413 - protein, 53 aa, Glycine max
  Clone ID: PAT_MRT3847_9342C.1.pep
VVTCIMKFNSVKFDEMHITMSYFGIFGVIIEILLVLVEFVSCDQQHVCIFITL

SEQ ID NO: 278414 - protein, 44 aa, Glycine max
  Clone ID: PAT_MRT3847_93430C.1.pep
LAIERFGQRWLHCASCRCAVDRGSWCEQLYALLVLRCCGIFSRR

SEQ ID NO: 278415 - protein, 69 aa, Glycine max
  Clone ID: PAT_MRT3847_93431C.1.pep
AAIAMLPAVVGLGSNTSHKANKFSKLQKSHPVIGNTTMIFPYSIIKLKPEDTHQGDRERERGREEEDNS

SEQ ID NO: 278416 - protein, 97 aa, Glycine max
  Clone ID: PAT_MRT3847_93432C.1.pep
CKAGRNQSRPSPKFDVERRNVNTRVEICCAGKPGLLLATVNTLETLGVEIQQCVISCFNDFTVQASCSEDLRVRTILSSEDIKQALFRSAGYGGRYL

SEQ ID NO: 278417 - protein, 92 aa, Glycine max
  unsure (1)..(92): unsure at all Xaa locations
  Clone ID: PAT_MRT3847_93433C.1.pep
FAGSGSXIAYNKXTDNXXXTPAGLISAXIAHAFALFXAVSVGANXSGGHXNPAXTFGXFVGGNITFLRGIVXVIAQLLXSIVXXXSXIRHRL

SEQ ID NO: 278418 - protein, 50 aa, Glycine max
  Clone ID: PAT_MRT3847_93434C.1.pep
FMRFAWVVRPRNLHLLACHVTNETMQLYQLSRWFRAQRTLEQNKKETDAE

SEQ ID NO: 278419 - protein, 80 aa, Glycine max
  Clone ID: PAT_MRT3847_93435C.1.pep
TNQYNYAILQVYHYAQPMTLPPCNKIGRYTTFFPSPKRKCGTLCLSVPARFRSNSSKGTNFMTTIILPILRILTHFYLNK

SEQ ID NO: 278420 - protein, 197 aa, Glycine max; identical to SEQ ID NO: 277763
  Clone ID: PAT_MRT3847_93436C.1.pep

SEQ ID NO: 278421 - protein, 121 aa, Glycine max
  Clone ID: PAT_MRT3847_93437C.1.pep
TGGFKSPIKELPFLNFSRFGKTPIFRGGQGNFFWKQKIFFLGKDHTPYTEVIKIFKPYISAIMSPFFNGYPFPRHCLSEYHFNNSPKIQTFKIFFYPHTEDLPLCFVYRLPGFYRPPLFFF

SEQ ID NO: 278422 - protein, 70 aa, Glycine max
  Clone ID: PAT_MRT3847_93438C.1.pep
HCTLVRKFMHVQIPTSVGLVHCTPFMSWHQIAASGQNLLMHLVTTGLSSCSFFCMPAAMNRGHRLKGYGG

SEQ ID NO: 278423 - protein, 50 aa, Glycine max
  Clone ID: PAT_MRT3847_93439C.1.pep
RQISEYDHFLYGGDSYLELGQSGSTKPTEILDRDRRYDDWLCFTSQYHYV

SEQ ID NO: 278424 - protein, 95 aa, Glycine max
  Clone ID: PAT_MRT3847_9343C.1.pep
MTTRTGKKDKGGSLGRRTLKPETKATGTRDQEPANNGPRPGGRPPKGKKTTPCAGHRRRETLSFPLLVYLLNTLLFDIGLRVRYKLSLVLSQVSA

SEQ ID NO: 278425 - protein, 85 aa, Glycine max
  unsure (1)..(85): unsure at all Xaa locations
  Clone ID: PAT_MRT3847_93440C.1.pep
SIQVTTIDCLPLVSIHQGNSKLYIKVSTQGPLDFKTHSXHFSVQSXSXFXXXERXFEIXXXXXXXXXXXXXXXXGGLLCSCXXDI

SEQ ID NO: 278426 - protein, 75 aa, Glycine max
  Clone ID: PAT_MRT3847_93441C.1.pep
CAVSVVSLAGRLPSPTLGTYNYTILVTSKTFISLFLLYRFCFNRNPLLWISTATRSPRLLFLSSILCIYLVTLSP

SEQ ID NO: 278427 - protein, 196 aa, Glycine max
  unsure (1)..(196): unsure at all Xaa locations
  Clone ID: PAT_MRT3847_93442C.1.pep
MQSYDLLPPPSLLHVPLPPSSTTRXFSTTTLRGPQPTNALIDPKLLSPHNDADDDETTNEFLSRFVWIMRKKVNEAYPDSDKPAVDGMLFAIVERFVSEMEKGGIETMSSFRSADFSEDLWRTVWEVSNLVLEDMDKEIKKEKMKGFLQCEEVKEMCRFAGEVXIRGDLLRELRFKWAREKXEEHEFYEGLERLRK

SEQ ID NO: 278428 - protein, 99 aa, Glycine max
  Clone ID: PAT_MRT3847_93443C.1.pep
CFLLSKPLWLRFLIRGLAPPCFFQWLRRAGFLAPKTGLFLESIDSRRKFLLGLHSLFLPFSFVTPQFFLLTFFFFSVSHFHWYIGVPQTVFKICFFLEF

SEQ ID NO: 278429 - protein, 68 aa, Glycine max
  unsure (1)..(68): unsure at all Xaa locations
  Clone ID: PAT_MRT3847_93444C.1.pep
REGSYKWDDNPQTGNYEYKTTTLVLXVRVMLGAWGANTGSIFTGGAIGYRKGFTWAAPDRIQQGIGFG

SEQ ID NO: 278430 - protein, 154 aa, Glycine max
  Clone ID: PAT_MRT3847_93445C.1.pep
DVIRGSPPEQQIFKMTAGGAAIMKEGPLLLKSTKKQRFVTLVTSRCSNNNMKQLFSMVLPKEEQQLLPPKGGVPHKEVAARQQGVRHISWSGGNDGSPKDDKFADQPSYELAAHTFFFIIILRGASIRYKISSCNMMHLSSILLRHKYCFTAVP

SEQ ID NO: 278431 - protein, 299 aa, Glycine max
  Clone ID: PAT_MRT3847_93446C.1.pep
LRARTGDSQDQLIRREELRVAPEEHPVLLTEAPLNPKANREKMTQIMFETFNTPAMYVAIQAVLSLYASGRTTGIVLDSGDGVSHTVPIYEGYALPHAILRLDLAGRDLTDFLMKILTERGYSFTTSAEREIVRDVKEKLSYIALDYEQELETARTSSSVEKSYELPDGQVITIGDERFRCPEVLFQPSMIGMEASGIHETTYNSIMKCDVDIRKDLYGNIVLSGGTTMFPGIADRMSKEISALAPSSMKIKVVAPPERKYSVWIGGSILASLSTFQQMWIAKAEYDESGPSIVHRKCF

SEQ ID NO: 278432 - protein, 379 aa, Glycine max
  unsure (1)..(379): unsure at all Xaa locations
  Clone ID: PAT_MRT3847_93447C.1.pep
MADTEDIQPLVCDNGTGMVKAGFAGDDAPRAVFPSIVGRPRHTGVMVGMGQKDAYVGDEAQSKRGILTLKYPIEHGIVSNWDDMEKIWHHTFYNELRVAPEEHPVLLTEAPLNPKANREKMTQIMFETFNTPAMYVAIQAVLSLYASGRTTGIVLDSGDGVSHTVPIYEGYALPHAILRLDLAGRDLTDFLMKILTERGYSFTTSAEREIVRDVKEKLSYIALDYEQELETARTSSSVEKSYELPDGQVITIGDERFRCPEVLFQPSMIGMEASGIHEITYNSIMKCDVDIKKGPLXGNIVLSGGTTMXSPGIADRMSKEISALAPSSMKIKVVAPPERKYSVWIGGSILASLSTFQQMWIAKAEYDESGPSIVHRKCF

SEQ ID NO: 278433 - protein, 150 aa, Glycine max
  Clone ID: PAT_MRT3847_93448C.1.pep
SDTDDSDDDDWRGQKTRRKRRKRRSNAGGDVRRVPTIERRRRVQNSDGNDSVGNGEAVDGGALAVPVAPESSKKAVALGGSRRRSERNLGKLDLNVEFSNEVEEPVHGAGEGNGNAEDNIEGIGFFEGLDEFLSSLPILNVVADDKVKGH

SEQ ID NO: 278434 - protein, 44 aa, Glycine max
  Clone ID: PAT_MRT3847_93449C.1.pep
PTRPRTRGWKLVVKFISHVRYTNPKKMDHNIVTFFLDWYNEDEI

SEQ ID NO: 278435 - protein, 135 aa, Glycine max
  Clone ID: PAT_MRT3847_9344C.1.pep
VWKKEDENKMATVPSPCPPPRSSPNNQVEAATNNGASHVDDKKPNFTDGRSEKYDHDYAHRLLAKYFSNKNFNGGNIFDLEITVNDEIIKSSSLTCYRSYADPVVGFEDQSSNGSTPPADSQANIPNGKHAVKKN

SEQ ID NO: 278436 - protein, 96 aa, Glycine max
  Clone ID: PAT_MRT3847_93450C.1.pep
ARAQRIVMDHLQDQWRTRKRAGGRKANSEANDVKPCAMDVDKAMVSYLTSGTKSTEKDDSEETPKTKVPRRLNSRTEAESNAKEYGRNLAGLLGKA

SEQ ID NO: 278437 - protein, 35 aa, Glycine max
  Clone ID: PAT_MRT3847_93451C.1.pep
LASIVLGLVLHDRFRSILWDICPSGNLAGHNTISN

SEQ ID NO: 278438 - protein, 62 aa, Glycine max
  Clone ID: PAT_MRT3847_93452C.1.pep
MAMASNKVIATILVLSFLAYSPSLTIACGPCHPKPIPFPLLPSGKCPKDTLNLGVCADVLGL

SEQ ID NO: 278439 - protein, 87 aa, Glycine max
  Clone ID: PAT_MRT3847_93453C.1.pep
KGVIYLLRCNLLISLCFIINLFYNPRNRIKLLFYSFLSNLGRLNFISNNFFSFKVIFLYQPREGNVFLETFYLRISFCFILILILAQ

SEQ ID NO: 278440 - protein, 222 aa, Glycine max
  unsure (1)..(222): unsure at all Xaa locations
  Clone ID: PAT_MRT3847_93454C.1.pep
RNLPGFNPNTRHCLYGLDADLIMLSLATHEVHFSILREVVTFPGQQEKCFLCGQPGHFAADCRGKPGEKAEDWNPPEXNTPFHKKKYXQFLNIWVLREYLQFELEIPNPPFEIDFERVVDDFVFLCFFVGNDFLPHMPTXEIREGALNLLMHIYRKEFTAMGGYLTDAGEVFLERVQHFIQSVAVHEDQIFQKRVRIQQATEINEEMKARARGDMPGEHVLS

SEQ ID NO: 278441 - protein, 114 aa, Glycine max
  Clone ID: PAT_MRT3847_93455C.1.pep
LTFLADARAGQGHVEWPSLNCRRHRQPTHITEGSHVRKQDVSIEYDACTIPNDRGSLDVAKVGNHKQMDRCHAARSKGRLGYATQMPYAEPVVHAQSPEGYKDYLPAEGDSQEG

SEQ ID NO: 278442 - protein, 90 aa, Glycine max
  unsure (1)..(90): unsure at all Xaa locations
  Clone ID: PAT_MRT3847_93456C.1.pep
TATQKTVDGPSXGNCGVMAAGLSRTSSLPLLRAAKAVGKVIPELNGKLTGMAFRVPTANVSVVDLTCRLEKPAKYDDIKKVVKQASEGPL

SEQ ID NO: 278443 - protein, 41 aa, Glycine max
  unsure (1)..(41): unsure at all Xaa locations
  Clone ID: PAT_MRT3847_93457C.1.pep
CRLYHXILWVYGLKXTXVXKWKXPVXXLMASXKASXLLXVX

SEQ ID NO: 278444 - protein, 150 aa, Glycine max
  Clone ID: PAT_MRT3847_93458C.1.pep
VMMTLESWVLSHQMFSSSSRLFYPAHENRRKSLPIKVLGRNTRYSFPFVPNCVAPSSFTRLHASSFEADAKLQDRTRLRCLGSSSDCLSDRNVVSNSNLNCIQELLKRGIILAATVCGLLVFGMVTEFSPLKGVVNARYGGLLDRAFFCL

SEQ ID NO: 278445 - protein, 709 aa, Glycine max
  Clone ID: PAT_MRT3847_93459C.1.pep
MAGLIDLNNATEDDEMPSSGSSSTVCLELWHACAGPLISLPKKGSVVVYFPQGHLEQHLHDFPLPASANIPSHVFCRVLDVKLHAEEGSDEVHCQVVLVPETEQVHQKLREGEFDADGEEEDAEAVMKSTTPHMFCKTLTASDTSTHGGFSVPRRAAEDCFPPLDYSQQRPSQELVAKDLHGQEWRFRHIYRGQPRRHLLTTGWSAFVNKKKLVSGDAVLFLRGEDGELRLGIRRAAQLKSGSTFSALSGQQGSPTSLMDVVNALSARCAFSIHYNPRVSSSEFIIPIHRFVKSLDYSYSAGMRFRMRFETEDAAERRFTGLIVGIADVDPVRWPGSRWRCLMVRWDDLEATRHNRVSPWEIEPSGSASTANNLMSAGLKRTKIGLPSAKLDFPVSNAIGTSDFGESLRFQKVLQGQEMLGVNPTYDSFNAQSHQLSDLRRCYPGSNYPRIAATGNSIGIPQVSSNVSSNGIGFSESFRFQKVLQGQEILPSQPYGRALSVDEACGNGRCGLFDGFQAMRSRNGWSSHVSNNSSHLHPPVPSGQVSSPSSVFMFQQAVNPVSNSDYNNQIGQVMGGKVHQRVSYASEVKGGKFVSTPYEPLLRGLSQEGTNSFGLSNFHNQLDSSRSHDSVSVLRASQELVPSCKSRCRVFGFSLTEGAPVASKEATDSSAVACAGPSFTRHVEDDFHPGHSLRSKAVASYCTKGVLQY

SEQ ID NO: 278446 - protein, 149 aa, Glycine max
  unsure (1)..(149): unsure at all Xaa locations
  Clone ID: PAT_MRT3847_9345C.1.pep
FTCSVRTPWNWDPSKRSFSQLTIDLIGGGMIVDKTGDWITLIQNCPMSNLLRVAARKKGCLMVKIEMAGNAPVKRSDWASLVQVFSTNSISTEHSDACKWTKSVPHSWEXIFPIEVRGPNNGCEMWSSEWANQTXWHLTFHIDNSKQDT

SEQ ID NO: 278447 - protein, 60 aa, Glycine max
  unsure (1)..(60): unsure at all Xaa locations
  Clone ID: PAT_MRT3847_93460C.1.pep
RPRRTGTXRQTRGILSKKTTKGASEVIYNKKTLAPTTTLWCSMSIYSFFYSWVIHLLTLN

SEQ ID NO: 278448 - protein, 712 aa, Glycine max
  Clone ID: PAT_MRT3847_93461C.1.pep
MAGLIDLNNATEDDETPSSGSSSSSSSSTVCLELWHACAGPMISLPKKGSVVVYFPQGHLEQHLHDFPLPASANIPSHVFCRVLDVKLHAEEGSDEVYCQVVLVPESEQVQQKLREGEFDADGEEEDAEAVMKSTTPHMFCKTLTASDTSTHGGFSVPRRAAEDCFPPLDYSQQRPSQELVAKDLHGQEWRFRHIYRGQPRRHLLTTGWSAFVNKKKLVSGDAVLFLRGEDGELRLGIRRAAQLKSGSTFSALSGQQGSPTSLMDVVNALSARCAFSIHYNPRVSSSEFIIPIHRFVKSLDYSYSAGMRFRMRFETEDAAERRFTGLIVGIADVDPVRWPGSRWRCLMVRWDDLEATRHNRVSPWEIEPSGSASTANNLMSAGLKRTKIGLPSAKLDFPVSNVIGTSDFGESLRFQKVLQGQEMLGVNTTYDSFNAQSHQLSDLRRCYPGSNYPRIAATGNSIGISQVSSNVSNNGIGFSESFRFQKVLQGQEILPSQPYGRALSVDEACGNGRFGLFDGFQAMRSRNGWSSHVSNNSSHLHPPVPSGQVSSPSSVFMFQQAVNPVLNSDYNNQIGQVMGDKVHQRVSYASEVKGGKFVSTPYEPLLRGLSQEGTNSFGLSNFHNQLDSSRSHDSVSVLRASQELVPSCKSRCRVFGFSLTEGAPVASKEATDSSAVACAGPSFTRHVEDDFHPGHSLRSKAVASYCTKVLY

SEQ ID NO: 278449 - protein, 62 aa, Glycine max
  unsure (1)..(62): unsure at all Xaa locations
  Clone ID: PAT_MRT3847_93462C.1.pep
XXXSTXXXXXXPXAFXSRSLPSTQHTXXXXXXXKXXXXRGSXXXVTIXHXXXVKAIXXXXXS

SEQ ID NO: 278450 - protein, 45 aa, Glycine max
  Clone ID: PAT_MRT3847_93463C.1.pep
IYLLLHALITLSPDSTLYTCIITLCSPSLRIINQRRYVSCMLYKR

SEQ ID NO: 278451 - protein, 50 aa, Glycine max
  Clone ID: PAT_MRT3847_93464C.1.pep
PNSPQSWTCLWGPLKREGLLGILSCLLLLIHRLLTGHMKMLITFGEQLCV

SEQ ID NO: 278452 - protein, 217 aa, Glycine max
  Clone ID: PAT_MRT3847_93465C.1.pep
MDSAFSINTTAQVALFRALHGHLHRAPQRALLRRNLKCLVTSYNSSSNCCRIPCSFGSVPSPSSLRSFRGLLPRTPRCISSSAASFASPAGGGNGGAGTGDGDGGGGSGGESGDANLKLVGDASQELSALSPDVIILDVSGMVCGGCAATVKRILENQPQVSSASVNLTTETAIVWPVSEAKNAPNWQKQLGEALAEHLTSCGYNSSLRVAGEEASY

SEQ ID NO: 278453 - protein, 61 aa, Glycine max
  Clone ID: PAT_MRT3847_93466C.1.pep
RPRVRRSKVQYSFLCTRQPLRNSWMLSSDPNIVIEKIGELEVHTSDGITGEESWVPGERVS

SEQ ID NO: 278454 - protein, 54 aa, Glycine max
  Clone ID: PAT_MRT3847_93467C.1.pep
NIGEGVNKSRGAPKVLYSHTFKLSYNNFFCFLYLINLVLFFFYSFIFFFFLIFY

SEQ ID NO: 278455 - protein, 56 aa, Glycine max
  Clone ID: PAT_MRT3847_93468C.1.pep
KQLHLLSPFPRSHLYRNQEGHVEEPYYFRINKYTLLLGNHSKFFCLSQIKPNDKKD

SEQ ID NO: 278456 - protein, 67 aa, Glycine max
  Clone ID: PAT_MRT3847_93469C.1.pep
MVDYSVWDHIEVSDDEDETHPNIDTASLFRWRHQARVERMEQFQKEKEELDRGCRECKRKVAECQRN

SEQ ID NO: 278457 - protein, 89 aa, Glycine max
  Clone ID: PAT_MRT3847_9346C.1.pep
IKWRACLHLLLLLLLLLHAPATPSPTTSWKLLQIMGFLTSMIKNLTSPMVLITWIVHSALRGSEKYDHDYAHRCWQNISLTKLQWRQHI

SEQ ID NO: 278458 - protein, 123 aa, Glycine max
  Clone ID: PAT_MRT3847_93470C.1.pep
RHLFTFKVLFPSASENQKQLSNFQPKHATNQELKYHNSPFPVHHGQIFFFFTLVTNPSLTINHPPNHVSEEALLLTESKFKRCQPNASRENCRYLPQQLVALLCSFNLCTFQIYWLSLSFFSL

SEQ ID NO: 278459 - protein, 95 aa, Glycine max
  unsure (1)..(95): unsure at all Xaa locations
  Clone ID: PAT_MRT3847_93471C.1.pep
QFLKWVRFMMKKRDQLXRQVGINTFSMEWTGSAXNRLLLMGNDSSVXENAKCDGLITKQDISKMCQVQNXLCCRHEKMMPEKTHLLMAWRSRIAG

SEQ ID NO: 278460 - protein, 43 aa, Glycine max
  Clone ID: PAT_MRT3847_93472C.1.pep
SLVLGLRLELSRSTYYSGNYSRHCRCEMRHHSRSRSIGKRTAC

SEQ ID NO: 278461 - protein, 45 aa, Glycine max
  Clone ID: PAT_MRT3847_93473C.1.pep
LNVFVKIRLMLKIWKFWKTKEINDFYVFNLINISFFDENFPFIPL

SEQ ID NO: 278462 - protein, 151 aa, Glycine max
  unsure (1)..(151): unsure at all Xaa locations
  Clone ID: PAT_MRT3847_93474C.1.pep
LRSRPFVLGRVGFNPHPRSDAWRXELLKRTGSHCDIICDTGWTAAPTQDVQASTDXLICSEERAPRTYGGXKPQKPFMLNWRMGKLTLPHGTSRKVKRMPLSTGGGAGANNAXLMYMHHAAPSMRRYLDGNLDFEGCKMTYTYIXCTVSFF

SEQ ID NO: 278463 - protein, 68 aa, Glycine max
  Clone ID: PAT_MRT3847_93475C.1.pep
CIMMLFELSVHLVSGGSVSGFGLIGSLFLICAPACLGWVSSNPPYIFCVQLSSWNAQFTRSARWHWQA

SEQ ID NO: 278464 - protein, 69 aa, Glycine max
  Clone ID: PAT_MRT3847_93476C.1.pep
VGYWVAEKIGHTMNLSDRGPMLNGQPITYRGYPYYSIVVNCFPNGPTQTLGASKRPHALLASTPRNWRT

SEQ ID NO: 278465 - protein, 49 aa, Glycine max
  Clone ID: PAT_MRT3847_93477C.1.pep
MNLERVSNEEKLNLCRKYYLGGFAFLPFLWLVNIFWFFKEAFFAPAYTE

SEQ ID NO: 278466 - protein, 74 aa, Glycine max
  Clone ID: PAT_MRT3847_93478C.1.pep
GRVSRVCIPASNPLRKPKRWMISGGSAHTKSKGWVGKKGPWRKQLIGSVESYRERWPQCNQNKCELILERDGAL

SEQ ID NO: 278467 - protein, 99 aa, Glycine max
  Clone ID: PAT_MRT3847_93479C.1.pep
RVREKLTPLSYPFPPYSPLRSNAAFYLKILANSLSQSPLLLYDCTAHFPWTSAIVAGFADEFCCDLFMQSYLCILEYSCNSNSCRFENIILYTCKHLTF

SEQ ID NO: 278468 - protein, 158 aa, Glycine max
  unsure (1)..(158): unsure at all Xaa locations
  Clone ID: PAT_MRT3847_9347C.1.pep
KSFLYWVHFFESGYTFKYDIIGAGSTFFRMIFPEKEDQXEIPKLIDARLRQRIDPXYNEVQAQMETNFDKLSLDDVETPKGSMLDLKISQSKIALPKNTFGGTILRSDLLGNFLTEGIFRAXSVVLHRTHXRIIGMYKMVATVGIPENSSILLVLAMN

SEQ ID NO: 278469 - protein, 135 aa, Glycine max
  Clone ID: PAT_MRT3847_93480C.1.pep
GEYWLATNYHDVATHSFHITSKQLHHLVTATFNQTNDNTNKAKTTTYFEIISALLWKCIANIRGQKIGPNVVTICTSESNRAENEFPTNGFLVLSKIEADFSTGKYEISELVKLIAENKMGENHVMEKLVEQMKG

SEQ ID NO: 278470 - protein, 58 aa, Glycine max
  Clone ID: PAT_MRT3847_93481C.1.pep
KQVYLLCHLSRQKAALVVERVRERVERGLSNWVLDWCGMLVVGSIGICFTLSSGSFDG

SEQ ID NO: 278471 - protein, 114 aa, Glycine max
  Clone ID: PAT_MRT3847_93482C.1.pep
LKERFIKKTHYLDYQFDEPTDIKLGFTTRENGLSPYPNHSFNMARYISDSAHHITHHQNILANLIGYTRDEWVFPIQTHDNRIVEVTSEHKGTNIGELTDDLHGINGMYTFDSH

SEQ ID NO: 278472 - protein, 107 aa, Glycine max
  Clone ID: PAT_MRT3847_93483C.1.pep
YLILSFIIAYQRGSAIGEKHLLVRFAVDRGGLVGPDGSTHYGAFDVTFTACLPNMVVMVASDDAEIFHTVATAAAISDQPCCFRYQKGNGVGVEIPPGNKGIPLEVS

SEQ ID NO: 278473 - protein, 240 aa, Glycine max
  unsure (1)..(240): unsure at all Xaa locations
  Clone ID: PAT_MRT3847_93484C.1.pep
MEENSALEHHCYYPLPASAAKADHPNHNDGEKEETCAEEGSSQHQPNTSQNCVSYQSNKPRLNRYALGGAILASTNSILLGYDIGVMSGASLLIRQDLKITSVQVEILVGCLNVCSLIGSLASGKTSDWIGRRYTIMVAAATFLIGAILMGLAPSFPFLMAGRVVAGIGVGYSLMISPVYVAELSPALTRGFLTSLPEVFISVGILLGYVSNYAFSXXPNGINWRLMLGLAALPSIAVAL

SEQ ID NO: 278474 - protein, 82 aa, Glycine max
  Clone ID: PAT_MRT3847_93485C.1.pep
EAASSSFLIFPDTPFRIVCKNVFVQRSFNRPFLLHLRRYPINHSLVGEVVRGEHISCKLVKVYYHCFLSFFRFAPNDGIIVR

SEQ ID NO: 278475 - protein, 155 aa, Glycine max
  unsure (1)..(155): unsure at all Xaa locations
  Clone ID: PAT_MRT3847_93486C.1.pep
ATRPQHLIDLRENGENCRGVGILGIAWPLGGMILILEYCTAGISGGHINTIGDTGPAVGXMAVLILPILYTVAQCLXLLCGVGLDNAIQNPYFSKXGGGANALGAGYTTGTGLGAESIVTFGXVNSALYATDPKTNAIYSHVADWAPLRIGPAEF

SEQ ID NO: 278476 - protein, 90 aa, Glycine max
  Clone ID: PAT_MRT3847_93487C.1.pep
SVAGCLARESMSACFGVFFFSCTLLFSFCSCLFFSSMMKPWCNCDVGNSYLTVRERIKVPQSLVLVTLISVVSPQPAPSTFTCWVTPSPR

SEQ ID NO: 278477 - protein, 88 aa, Glycine max
  Clone ID: PAT_MRT3847_93488C.1.pep
FVPTQPTGVVKNPPFLNCFVPNLLNLIISLYRFFLGNHQKMVGNFKKKPRVGVTQPKRVVHIPMFVCPLMEHGPINFCLHALGKYIPK

SEQ ID NO: 278478 - protein, 80 aa, Glycine max
  unsure (1)..(80): unsure at all Xaa locations
  Clone ID: PAT_MRT3847_93489C.1.pep
TEGEPHRFYKAAAQXXGGAKKEKTARAQTRTPQXGGGGKSTRTSPELDIYFNASCTTNCLAPLAKGYQMTRFWHWLRVLM

SEQ ID NO: 278479 - protein, 145 aa, Glycine max
  Clone ID: PAT_MRT3847_9348C.1.pep
VWKKEEENKMASVPSPSPPPRSSPNNQVEAATNNGASHVDDKKPNFTDGLDHLDSPQCIERFKKYDDDYAHRLLAKYFSNKNFNGGNIFDLEITVNDEIIKSSCLTNYRSYADPVVGFEEQSSNGSTPPADSQANIPNGKHVVKN

SEQ ID NO: 278480 - protein, 513 aa, Glycine max
  Clone ID: PAT_MRT3847_93490C.1.pep
MGEVADEGQYFRSEIALLNYSDATFKPPLSSLLIHIDPLIIPNGHTCSASESDPSPTSQHHQQEQHPKDAWLPITESRNGNAYYAAFHILNSNIGFQALMLPVAFATLGWAWGTVCLSLAFVWQLYAIFLLVQLHESVPGIRHSRYLFLAMAAFGKKLGKVAALFPVMYLSGGTCVMIIITGGGTLKQLLKTLCDNDDHVHEQITCNAHALSGAEWFLVFTCVAILIAQLPNLNSMAMVSLVGAVTSVTYCTLFWVLSVKNGRPNNVSYSSSLQSQEHTPVAKINGVLNAIGIIVLAFRGHNVLPEIQGTLPSNFEQTSKRPMRRGVSISYVLISMCMFPLAIAGFWAYGNQINDGGLLTSFPQFHKRQITKFSMGAIYVLVIIHCLTSFQIYAMPVFDNLEIRYTSIKNQRCPRLVRTCIRLFFGGLTFFISVTFPFLPRLSALLGSMTLVPITYAYPCFMWLSLKKPRPRGFVWCFNVALGCVGMLLSALLVAAAIRTLALNGLDANFFKP

SEQ ID NO: 278481 - protein, 76 aa, Glycine max
  unsure (1)..(76): unsure at all Xaa locations
  Clone ID: PAT_MRT3847_93491C.1.pep
FKVVKSGGGYLKKKKXXKGKXKEKENKEXXXEKDEXEKLFFFVXKYKVIIXXIVFDCLRINGSLERKVIRELLVIG

SEQ ID NO: 278482 - protein, 72 aa, Glycine max
  Clone ID: PAT_MRT3847_93492C.1.pep
GKKKQPGFLWTFGSGAILMAIFGGGGGDNTGFDRTKNWFVRVPTNQPSQGFLDFFKPGISRLFLAPGNFNFG

SEQ ID NO: 278483 - protein, 129 aa, Glycine max
  unsure (1)..(129): unsure at all Xaa locations
  Clone ID: PAT_MRT3847_93493C.1.pep
QDKWVWLSDPTGLYTVCSAYKLLDRDSRDENIDGVFHDKWKLKIPSKAAFFAWRLLRDRFPTKSNLCRRNVDIIDKLCPFCXDKEEEAAHLFFSCHKIMPLWWESLSWISMVGVFPQNPRQHFLQHSFC

SEQ ID NO: 278484 - protein, 149 aa, Glycine max
  unsure (1)..(149): unsure at all Xaa locations
  Clone ID: PAT_MRT3847_93494C.1.pep
RPVYIPHSPPPPPPPVYSPPPPPPVYSPPPPPPVYSPPPPPPPPPPPPPVYSPPPPPPSPPPPSPPPPSPPPVYSPPPPPPPPPPSPPPPSPPPPSSPPPVYSPPPPPTSPPXPSPTYCVRSPPXPSPXXPSPXPSPPPVFSPPPLCNT

SEQ ID NO: 278485 - protein, 47 aa, Glycine max
  Clone ID: PAT_MRT3847_93495C.1.pep
TMSRDMHIIRMFKDRHPSEIYIQRWVLDCRVWSLHPSPWCLESHYEL

SEQ ID NO: 278486 - protein, 90 aa, Glycine max
  Clone ID: PAT_MRT3847_93496C.1.pep
FGSSLLTDDTPQTRGSTNPIQDSHLKIVQQALELTETAPTDLPATQNSILTAARNSKAKTQDNDKNHKKHTDMDKNHDLQHNKHNHRQQD

SEQ ID NO: 278487 - protein, 63 aa, Glycine max
  unsure (1)..(63): unsure at all Xaa locations
  Clone ID: PAT_MRT3847_93497C.1.pep
RPGVLVDQVKKITAINIPVESGEFVTXGVVAKAKVHFNFKYKGLIKPPQLVLVDSLRYLIMRP

SEQ ID NO: 278488 - protein, 128 aa, Glycine max
  unsure (1)..(128): unsure at all Xaa locations
  Clone ID: PAT_MRT3847_93498C.1.pep
KKKRPPIATTSKNPGKXGLKKKEMFQKXKRTKKKIXHRAAPLQPGGGERPPGEPPPPRGXPPRGGDRPTEGXGGTPTPPPKVSPPXXKQLXGGGNLLLSVTPENIVGGKSNLAQKNFPREPKNCLFFF

SEQ ID NO: 278489 - protein, 61 aa, Glycine max
  Clone ID: PAT_MRT3847_93499C.1.pep
TRLVNCLLNVTHLLPGIPAHTSLVTPDKHDSATEALHEKATTQIINEGDGSETFQILNLLL

SEQ ID NO: 278490 - protein, 160 aa, Glycine max
  unsure (1)..(160): unsure at all Xaa locations
  Clone ID: PAT_MRT3847_9349C.1.pep
LRVRGRVGFRGRASSDFYTICSQDCELWNPACTKAMTMLFIPNPCFDAXSLXFLKRTGFHCDIICVTGWTATSMQEVQVTIDWIIPSKECVPRTYCVLNPQNPFELNRWMGXKLTFLQGTIQSVKRKAFXIGGGLXANNAILMXMPKAVFSRGEFCGGLS

SEQ ID NO: 278491 - protein, 145 aa, Glycine max
  Clone ID: PAT_MRT3847_934C.1.pep
EFEAEMLNFQVELTCDSLAGYMFLEFMPKYCPTEALVMDTLHSQRYELLEMSTLLFRSHIHRSLVINPTLKARFSQLEMSRDIAVMSGTVNTTQYSLRDIDTEEIRRAVKPLSHRIIILWIGKLIPEKGPMHLIRIVRELKKYHR

SEQ ID NO: 278492 - protein, 71 aa, Glycine max
  Clone ID: PAT_MRT3847_93500C.1.pep
SLSSTIEGLFAPLEDRFPCRGFLPQLLTGPCTRFCNIGHDQICPCIVPGPSFGKVIPLFVVVNGQQFFLCD

SEQ ID NO: 278493 - protein, 63 aa, Glycine max
  Clone ID: PAT_MRT3847_93501C.1.pep
RPAYYHKYIPTKSYTMAACYMKTGTNMPEPSLNLTAWNALTNTQLLLASYAKSWNTPVKMIEK

SEQ ID NO: 278494 - protein, 191 aa, Glycine max
  Clone ID: PAT_MRT3847_93502C.1.pep
MEEKTEKVKSEAVQIIEAFEVLPKLVVFDLDYTLWPFYCECRSKREIPSLYPHAKGILLALKEKGIDIAIASRSPTADIATAFLNKLNLTPMFVSQEIYSSWTHKTDHFQRIHSRTGVPFNSMLFFDDENRNIQAVSKMGVTSILVGDGVNLGSLREGLTQFSRNWNASQKNKQKWLSKYSNKSDTSNPTA

SEQ ID NO: 278495 - protein, 238 aa, Glycine max
  unsure (1)..(238): unsure at all Xaa locations
  Clone ID: PAT_MRT3847_93503C.1.pep
MKASTLPVYSTPLPKTSNFSLHLLPMASIPTLSSTLPTLSAHSLSHSNPNNHCTLPPTSLFGTRITLLRATSSSHSLPNTNCRATSATVSFSLPTPKPLSDTPEKTPKWSERAXIKSYAMGELEARKLKYPDTGTEALLMGIVVEGTXKAAKCLRANGITLLKVREETVGLIGKSHVNFFWLEQAPLTEXHLLLGIWSQKESAGQQILATLGFNDEKAKELAKTIGGDVXDLSFKRQA

SEQ ID NO: 278496 - protein, 109 aa, Glycine max
  Clone ID: PAT_MRT3847_93504C.1.pep
MSKRARSPRLELRLNLSPPRAAATSIISSSELSSTESSTLSPVSVQSLESSCVSSEAEETRAMLLVGCPRCLLYVMLSEVDPKCPKCKSAVLLDFLNNEENNTKKSSSE

SEQ ID NO: 278497 - protein, 253 aa, Glycine max
  unsure (1)..(253): unsure at all Xaa locations
  Clone ID: PAT_MRT3847_93505C.1.pep
MKAPTLPFCPTHLPKTSHFSLHLLPMASIPTLSSSLPTLSAHSSSHSNPNNHCTLPPTSLFGTRITLLRATSSSHPLPNTNCRVTSATVSFSLPTPKPLSDTPEKTPKWSERAIKSYAMGELEARKLKYPNTGTEALLMGILVEGTSNAAKFLRANGITLLKVREETVGLLGKSDVIFFSPEHPPLTEPAQKPLIXEKLKSGGNKRYLXLGIWSQKESAGQQILDTVGFNDEKAKELAKTIDGDVDLSFKRQA

SEQ ID NO: 278498 - protein, 67 aa, Glycine max
  Clone ID: PAT_MRT3847_93506C.1.pep
WNLESLFGRGWGGKRELGIFPQYLNEVKKFVLSSAFLFMLIYLVNNVDASPVCVCVCFFFFWEKKQK

SEQ ID NO: 278499 - protein, 90 aa, Glycine max
  Clone ID: PAT_MRT3847_93507C.1.pep
ADLANEYLELIDQGLNDIDTLASVVSFLLLSSRLICIVPLLWFEECIILAEDNVDGGDVVDYAAEAGDRAGQETPLAIDHLLLLAISLSV

SEQ ID NO: 278500 - protein, 74 aa, Glycine max
  Clone ID: PAT_MRT3847_93508C.1.pep
GFYMLCANKPHRAFPMSGGHLQFHISFIFLTCWAFNKQAKGILSMLLFLTPDPFFCLCLREPWAIPTPWNSQNT

SEQ ID NO: 278501 - protein, 49 aa, Glycine max
  Clone ID: PAT_MRT3847_93509C.1.pep
HYTHLWDAILIQFSYNLCDHNTANISRIATSHTSYDSGDVMCLDQLVSA

SEQ ID NO: 278502 - protein, 82 aa, Glycine max
  Clone ID: PAT_MRT3847_9350C.1.pep
KDGHGLNHQIPSVKQMVFWGHNYVLRGAIYTIQYTDCKVHHCHPLTYSAFHIHSSCLSTIKKVHDIILSLFLFNYQIFYLFI

SEQ ID NO: 278503 - protein, 151 aa, Glycine max
  Clone ID: PAT_MRT3847_93510C.1.pep
MGSGALQLLLILGLLASSCLAQAPGAAPTQPPTTTPSPPPPRSAPAPAPTPPATPPPATPPPAAATPPPATSPPATTPTPTPTAAPTPASSPATSPVPSASSPPAPGTAGPAPGPAGGAEPPPPPSAAFSASKAFIAGSALSGIFVAMVLA

SEQ ID NO: 278504 - protein, 159 aa, Glycine max
  Clone ID: PAT_MRT3847_93511C.1.pep
MGSGAVQLFLILGLLASSCLAQAPGAAPSQPPTTTPSPPPPRSAPAPAPTTPATPPPATPPPAATPPPAATPPPAATPTPAPAPPTAAPTPASSPAASPPSPSPTVTPSPTSPNTPPGPSPGPSGSAEPPPPSAAFSASKAFIATSALAGTFVAMALVA

SEQ ID NO: 278505 - protein, 30 aa, Glycine max
  Clone ID: PAT_MRT3847_93512C.1.pep
DQNRITGVESMELLYIFCRTINNYTCVTVQ

SEQ ID NO: 278506 - protein, 142 aa, Glycine max
  Clone ID: PAT_MRT3847_93513C.1.pep
MGSGALQLLLILGLLASSCLAQAPGAAPTQPPTTTPSPPPPRSAPAPAPTPPATPPPAAATPPPATTPTPTPTAAPTPASSPATSPTSEPSPAPIPTASSPPAPGTPDPHPDPPVAPSLHRPPLHSPPARPSLLPLHSLEPS

SEQ ID NO: 278507 - protein, 48 aa, Glycine max
  Clone ID: PAT_MRT3847_93514C.1.pep
MLVQASLFSYTNKIKLITRLNYLNESSSSFVGLTLIACKYLVCVCVCV

SEQ ID NO: 278508 - protein, 97 aa, Glycine max
  Clone ID: PAT_MRT3847_93515C.1.pep
MGSGAVQLFLILGLLASSCLAQAPGAAPSQPPTTTPSPPPPRSAPAPAPTTPATPPPAATPTPAPAPPTAAPTPASSPAASPPSPSPTVTPSPTFSN

SEQ ID NO: 278509 - protein, 67 aa, Glycine max
  Clone ID: PAT_MRT3847_93516C.1.pep
QGKTATPKKGIKYRTKKKNLVFKKAKALRKKTPIKGGFKQGTLQTKKRLQKGKLRTHIGPSKKTGPP

SEQ ID NO: 278510 - protein, 148 aa, Glycine max
  Clone ID: PAT_MRT3847_93517C.1.pep
YWTAGGTMRNVPIGAGRRKNKHLASQYRHIIVTSDGIPTSRLETTDSSGLQQQHIASLESSVPFRSSADNGTVLKFGPDIPLCESMDSMLNLRDQRRCVDASSISCVEYRGEPSLYGSSVTTNGAQGSELSEHSPSNWLQCYPVPPWV

SEQ ID NO: 278511 - protein, 53 aa, Glycine max
  Clone ID: PAT_MRT3847_93518C.1.pep
RTLITREFLSVNWKTFLPDQPKVRLETYMLRQGSCTKSQFGSKGLQMAEHNVY

SEQ ID NO: 278512 - protein, 37 aa, Glycine max
  Clone ID: PAT_MRT3847_93519C.1.pep
KVLMHPPRRLIQSRPEQRMVLFQVNRPIQYAVKNLEP

SEQ ID NO: 278513 - protein, 114 aa, Glycine max
  Clone ID: PAT_MRT3847_9351C.1.pep
PVGLWCRSWSLGAPSISVTGGSGVSVLILFADLDLNFGGLVSRVDDILGNNSALNAFFFRNGAGFLLGSPLLSSFTTMPFYHLLPTMPFYHLLTTMPSISSHDQQALISPRFQP

SEQ ID NO: 278514 - protein, 74 aa, Glycine max
  Clone ID: PAT_MRT3847_93520C.1.pep
RLEADRFFTSNFNEDAYTKKGLEWVNTTESLKNVIDRHYPEITHKWLNSSSVFSVWNSPPNTQNPIPLYLRVPH

SEQ ID NO: 278515 - protein, 172 aa, Glycine max
  unsure (1)..(172): unsure at all Xaa locations
  Clone ID: PAT_MRT3847_93521C.1.pep
ENIDTAKLAXKTARYEEMVVFMAKXNTVVAEVLTKEERNLLCVSYTNGIDTXRALWMIMSSIVLQDESIGNVDHVVIIKEDRCVNEGXLIMNCDGILNLLESNLIPFIAFPDSKIHFLEMKGDSEETLAQFKTGAETKDADESTFIADRXSHDIAFVDLAPTHPIRLGPALT

SEQ ID NO: 278516 - protein, 63 aa, Glycine max
  Clone ID: PAT_MRT3847_93522C.1.pep
GKTSAQTSGIGEKIIEVGYIITQTVSQIRGSTNAGYIHWKTLIYDHVTHVNLESNQHGMPKSE

SEQ ID NO: 278517 - protein, 44 aa, Glycine max
  unsure (1)..(44): unsure at all Xaa locations
  Clone ID: PAT_MRT3847_93523C.1.pep
RRWDDIDAGNGEXFGDTTRXXRKKIXLEKXSSLREDEQQCYPMP

SEQ ID NO: 278518 - protein, 81 aa, Glycine max
  Clone ID: PAT_MRT3847_93524C.1.pep
NKQNDEMTRKMPYPSHFRSLPAGDRAWSSILSDMVSGAKDRKFVTIGHCLVGGKVRVFFPSTRSWNSVDDDDGGSVTESEL

SEQ ID NO: 278519 - protein, 52 aa, Glycine max
  Clone ID: PAT_MRT3847_93525C.1.pep
PTRSVLDRERLANIGKWGSNKQPGSGVLHAPPLRTHPSQRLSLLLRHLNSID

SEQ ID NO: 278520 - protein, 513 aa, Glycine max
  Clone ID: PAT_MRT3847_93526C.1.pep
METPPPQQGVVKKKETRGRKPKPKDEHGKGLKEGRKTQQQQQQQQQHHHQQQQQQQDQPSVDEKYTQWKSLVPVLYDWLANHNLVWPSLSCRWGPQLEQATYKNRQRLYLSEQTDGSVPNTLVIANCEVVKPRVAAAEHISQFNEEARSPFVKKYKTIIHPGEVNRIRELPQNSKIVATHTDSPDVLVWDVESQPNRHAVLGATNSRPDLILTGHQDNAEFALAMCPTEPYVLSGGKDKTVVLWSIEDHITSAATDSKSGGSIIKQNSKSGEGNDKTADGPTVGPRGIYCGHEDTVEDVTFCPSSAQEFCSVGDDSCLILWDARVGSSPVVKVEKAHNADLHCVDWNPHDDNLILTGSADNSVRMFDRRNLTTNGVGSPIHKFEGHKAAVLCVQWSPDKSSVFGSSAEDGLLNIWDYEKVGKKIERSGKSISSPPGLFFQHAGHRDKVVDFHWNAYDPWTIVSVSDDCESTGGGGTLQIWRMSDLIYRPEDEVLAELEKFKSHVVACASKTEK

SEQ ID NO: 278521 - protein, 90 aa, Glycine max
  unsure (1)..(90): unsure at all Xaa locations
  Clone ID: PAT_MRT3847_93527C.1.pep
RTKQEPHSWEGVFAIKVCGPNNGHETRSSGXANQTSWHPSVLIDNPKQTTEVDILLGISQDFEIDGNTHMPALSVPQAAAISTENAESSA

SEQ ID NO: 278522 - protein, 302 aa, Glycine max
  Clone ID: PAT_MRT3847_93528C.1.pep
YRRLALIIIAAVMLVLTFLGFLFSIFGIQLLVYILVIAGWVLVTGTLILCGLFLVLHNATADSCIAVNEWIQYPTAHTAMDDILPCVDNATAQETLSRSKEVTSELVNLVNQVITNVSNLNFAPNFTPLYYNQSGPLMPLLCNPFHPDMTDRQCDAGEVTLSNATQVYGNFVCQVSPSEICMTQGRLTPTFYNQISAGINVGNALYNYAPSLIELQDCTFVRETLSDISRDHCPGLQRYSRWIYIGLVMVSFAVMFSLIFWIVYGRERRHRLYRKESKDFTPTHAPAPAPGQALALVQIPEG

SEQ ID NO: 278523 - protein, 115 aa, Glycine max
  Clone ID: PAT_MRT3847_93529C.1.pep
MLSYRPLPFCFLLTIFLSTSCLLSHQASGTENEGKDVVGLSRLYVFAAAPFESSPLPLAAERTRRKDPLDGFNKYIYGWNITSSDYWASVTYTAVPLFSIAAVWFLGFGLCLLII

SEQ ID NO: 278524 - protein, 89 aa, Glycine max
  Clone ID: PAT_MRT3847_9352C.1.pep
FCVFPCSKNLPLPAHLFTKFPPECPSAGEGLSFMLYNIIYPSQYLNFVIEGANILPYTGFPCVFSPFLFSVVGCVGRKTCSEYLRPIFH

SEQ ID NO: 278525 - protein, 63 aa, Glycine max
  Clone ID: PAT_MRT3847_93530C.1.pep
NSARDLSHTQNIGRMIKAHFPHSQFIVVSLKEGMFNNANVLFRTKFVDGVSTVQRTVASKQSK

SEQ ID NO: 278526 - protein, 76 aa, Glycine max
  Clone ID: PAT_MRT3847_93531C.1.pep
SQLVLPWFSFPGSFFHQNVVNLQGSRHKSHPDHQFLLALPFNQARPCLVDEMQCFFSNLQISINHLWPVIIMRLQH

SEQ ID NO: 278527 - protein, 73 aa, Glycine max
  Clone ID: PAT_MRT3847_93532C.1.pep
TLSPISTILKFFAKLYYKNEHSLSTTYSSKSSHSSFILSSTLYTSQSSQTFSPSNSQLNPHSHITHSSLQLQF

SEQ ID NO: 278528 - protein, 104 aa, Glycine max
  Clone ID: PAT_MRT3847_93533C.1.pep
MKGALDRTKVVLRHLPPSISEAALLSQIDAAFAGRYNWLSFRPGKISQKHMSFSRAYIDFKRPEDVILFGEFFCGARFVNVKGSLRSTVIDVYACPPMFLVCGC

SEQ ID NO: 278529 - protein, 55 aa, Glycine max
  Clone ID: PAT_MRT3847_93534C.1.pep
FIVKVRKKKKKDVQAIPINRNLLFISTIKQERKYFSFFQFFLYQTIYDSSHFFFI

SEQ ID NO: 278530 - protein, 515 aa, Glycine max
  unsure (1)..(515): unsure at all Xaa locations
  Clone ID: PAT_MRT3847_93535C.1.pep
MKGALDRTKVVLRHLPPSISEAALLAQIDAAFAGRYNWLSFRPGKISQKHISYSRAYIDFKRLEDVILFAEFFNGHVFVNGKGSQFTVWIVYAPSQRVPRQWSKKDLRDGTIYKDSEYLEFLELLAKPVENLPSAEIQLEKREAERSGAAKDIPIITPLMDFVRQKRAAKGPRRPLSNGKVSRRAGTSSNGGPSSATSRRGSGKKRVSATMYVARDPGKSSTIKDKSSYTLVPKQDDQHLPNKASNMASSDGNQTLDENGVSGNHDAGKKKVLLLKGKEREIITVSDLDSMSQHHNVTSSAKTVVGSTVLKQSQRHEGSGRIIRSILSKKELHQSQSSRALSEQKILTSNLEKEKQPPRPLHVQLILKGSNGTPENKIGVHDSHVSSERQERHVRHKDRPDRGVWTSRFNGADVSFSSPASSQVDPLEGSQADLKHDMPNARSXGEVKSLGSVRTSHSSENGFNKHFGRRGPSHGVKDVDGYSVSSEGKHPRRSSTSAYGSNEKQVWVQKASSGT

SEQ ID NO: 278531 - protein, 117 aa, Glycine max
  Clone ID: PAT_MRT3847_93536C.1.pep
MGSSVRVKEASVVTPSEPTPSSVLALSALDSQLFLRFTIEYLLVYNPCPGLDQAATTARLKAALAQALVPYYPFAGRVRTRPDGPGLEVVCGAQGAVFIEASADRYNVNDFEKAPKA

SEQ ID NO: 278532 - protein, 94 aa, Glycine max
  Clone ID: PAT_MRT3847_93537C.1.pep
KWGQVTPVRLPLAAAKKREPENSRGRRGTLCNEIRRRRSSPSVSRRHFQKGLTQHPRRSLCQNTRWRPLEYFKPASVNRAVRMHIIITPLQCPV

SEQ ID NO: 278533 - protein, 148 aa, Glycine max
  Clone ID: PAT_MRT3847_93538C.1.pep
DLIGRAGDLDGAYKFITRMPMTPDANVFGSLLGACRLPNKVELTELLAERILQLKADDSGHYVLLSNLYASGKRWEDMSKVRSMIKDKGLEKKPGSSWIQVGHCIYVFHATSAFHPAFAKIEETLNSLLLVMKSEDYMLTNVNDKLLT

SEQ ID NO: 278534 - protein, 198 aa, Glycine max
  unsure (1)..(198): unsure at all Xaa locations
  Clone ID: PAT_MRT3847_93539C.1.pep
EFGCEGLAAAKQGLLSPRLPRLSEPDEQGWRTYRKPDEKSGGHGVGWSPIIINTYSFSEPKEWEPVSIADLGGTEIDLRFASSNAXGRLFVIVAPVLRFSDDLGDNATIEKIGPPEKVINAFGPEMIGENVEGKVLSVSAAEHEGRTYYQFELEPPHIFITATAAGNRLYLFGVTGSGLQWKRHYNDLKKIAESFRVV

SEQ ID NO: 278535 - protein, 100 aa, Glycine max
  Clone ID: PAT_MRT3847_9353C.1.pep
ERYSATDLLICSRYRARCYKASLGAYVGTHAALTYSMMPINPKLPSNAAHSMSTQCALKRLGVTELIELRSTAGVTFANDARESYFHDIAALQLTTLNNG

SEQ ID NO: 278536 - protein, 56 aa, Glycine max
  Clone ID: PAT_MRT3847_93540C.1.pep
PSSATGPGPLRVHRVPNCVMHCPRGALYWGTIYRHASVQLSEHSMMLLNSKKLAAY

SEQ ID NO: 278537 - protein, 42 aa, Glycine max
  Clone ID: PAT_MRT3847_93541C.1.pep
GQVLLHSAASPTSFQHNKSWQKLQGISSHPTAFVELKLHSHM

SEQ ID NO: 278538 - protein, 105 aa, Glycine max
  Clone ID: PAT_MRT3847_93542C.1.pep
EKKKNPFQNWGFKQQFSRSKNWEAKPPKNVCPPGAPLKPYLLKRLFPHPDKNPWGGPFNVPPQMWGPLITNSQLQKLQCPCELWEIPNQGAIPHGKLLTASQVTH

SEQ ID NO: 278539 - protein, 61 aa, Glycine max
  Clone ID: PAT_MRT3847_93543C.1.pep
VKSYLAEKMRLSLVSMVGCTMLSTTPMFVAKDRVSVRSYLQGSVYVVGLVRIFPNKIVGVL

SEQ ID NO: 278540 - protein, 71 aa, Glycine max
  Clone ID: PAT_MRT3847_93544C.1.pep
ICILSLVKDLSIGRPRIVQRVESTTSRGMLSDQSRVFHGSISEEGYCGPHVGYTFKHASWMRVVNTITFVR

SEQ ID NO: 278541 - protein, 98 aa, Glycine max
  unsure (1)..(98): unsure at all Xaa locations
  Clone ID: PAT_MRT3847_93545C.1.pep
GMHIFVKTLTGKTITLXVESSDTIDNVKAKIQDKEGIPPDQQRLILAGKQFEDGRTLADYNIQKESTLHLVSRLRGEMQIFCQTLTGKTITLEVGSSD

SEQ ID NO: 278542 - protein, 33 aa, Glycine max
  Clone ID: PAT_MRT3847_93546C.1.pep
QNFKEAFLRCSDASDDYPGICGRVIIGSRLNLN

SEQ ID NO: 278543 - protein, 120 aa, Glycine max
  Clone ID: PAT_MRT3847_93547C.1.pep
RGEFLRKLKELVEGKRAALPRVFVKGRSMGGFQNLEKLTNPGYLGRILNLTPVKRGIGSLTFHVCGGGRFFSFSSCAGRFKFFPQKKGPQLYSKWVGPRQRLSFTVSQIRCSPLLFTPPL

SEQ ID NO: 278544 - protein, 103 aa, Glycine max
  Clone ID: PAT_MRT3847_93548C.1.pep
ALCLALDHGSKSKSDCADGLPLYLSPFPFAYSSHFSSSEARSRPCYTKSLGSVVPQARGVGKEIRQFMWTFVVEGIYFQLWGRTFLISPAPSPGFVVVHNWEG

SEQ ID NO: 278545 - protein, 276 aa, Glycine max
  unsure (1)..(276): unsure at all Xaa locations
  Clone ID: PAT_MRT3847_93549C.1.pep
PRVRPRVRNLTQLAGLNLANNTLSGEIPDLNLSRLQVLNLSNNNLQGSVPKSLLRFSESAFSGNNISFGSFPTVSPAPQPAYEPSFKSRKHGRLSEAALLGVIVAAGVLVLVCFVSLMFVCCSRRGDEDEETFSGKLHKGEMSPEKAVSRNQDANNKLVFFEGCNYAFDLEDLLRASAEVLGKGTFGTAYKAILEDATTVVVKRLKEVAVGKKDFEQHMEIVGSLKHENVVELKAYYYSKDEKLMVYDYHSQGSISXMLHGKRGEDRVPLDWDTSL

SEQ ID NO: 278546 - protein, 133 aa, Glycine max
  unsure (1)..(133): unsure at all Xaa locations
  Clone ID: PAT_MRT3847_9354C.1.pep
VSQQVTNWKKGCLMVKIVMSGNAAVKRSDWASLVQVFLTYSNSTEHSDACKWTKSEPHSWELIFPIXEVCGPNNGNEMWSSVWAYQTSWHLGFLIDYPKQSTVCDIVWGIHQDSAMAGNTLMPAFSVAQATAR

SEQ ID NO: 278547 - protein, 52 aa, Glycine max
  Clone ID: PAT_MRT3847_93550C.1.pep
KTFFLLPPSHYILIFKKEKSIIYFDIACKNYIIYSIYVILQIKTSQKIINNI

SEQ ID NO: 278548 - protein, 50 aa, Glycine max
  Clone ID: PAT_MRT3847_93551C.1.pep
LDNGYLVHASLHISHLPIRIESYKAMPFLLVKLQSCLGDSLFLLLGAESL

SEQ ID NO: 278549 - protein, 67 aa, Glycine max
  Clone ID: PAT_MRT3847_93552C.1.pep
RTGYGTRYHGSTARAIVNEVVPTSASKDSMTLHDEGENLLKSLKTMPRAFMNDSASLINTWMTSTEC

SEQ ID NO: 278550 - protein, 64 aa, Glycine max
  Clone ID: PAT_MRT3847_93553C.1.pep
GMICAKYVICFIIQSWYMPLSNDRCQGCPSSQGIVMPMASVLYHECSVLSLVVDIYQGENVSFQ

SEQ ID NO: 278551 - protein, 50 aa, Glycine max
  Clone ID: PAT_MRT3847_93554C.1.pep
VHFLFFFFLSLLSTLLIIVVIISGKHSVWTWKILVSKEAKSNHSVSVTIN

SEQ ID NO: 278552 - protein, 60 aa, Glycine max
  Clone ID: PAT_MRT3847_93555C.1.pep
TGAITSGGFSPCLQKNISLADVTSGVRKAGATVKFIIRGSPNERVLTSMPFVRTKQYKPS

SEQ ID NO: 278553 - protein, 88 aa, Glycine max
  Clone ID: PAT_MRT3847_93556C.1.pep
SQSSSTVSVKFNSRAVAVVFQHWDREDVAHFNRSRLDEHVASCSSSKQDRADSDSQDLHCLNGKGDADCPGTCSVTAVVVMVSVTVTF

SEQ ID NO: 278554 - protein, 177 aa, Glycine max
  unsure (1)..(177): unsure at all Xaa locations
  Clone ID: PAT_MRT3847_93557C.1.pep
LRPLVAATXXAXVMQAGCXVSYAQLTPTFYRETCPNLFPIVFGVIFDASFTDPRIGASLMRLHFHDCFVQGCDGSVLLNNTDTIESEQDALPNINSIRGLDVVNDIKTAVENSCPDTXFFNLTQLKASFACQGLNTLDLVTLSGGHTFGRARCSTFINRLYNFNNTGNPDPTLDTTY

SEQ ID NO: 278555 - protein, 352 aa, Glycine max
  Clone ID: PAT_MRT3847_93558C.1.pep
MGSMRLLVVALLCAFAMHAGFSVSYAQLTPTFYRETCPNLFPIVFGVIFDASFTDPRIGASLMRLHFHDCFVQGCDGSVLLNNTDTIESEQDALPNINSIRGLDVVNDIKTAVENSCPDTVSCADILAIAAEIASVLGGGPGWPVPLGRRDSLTANRTLANQNLPAPFFNLTQLKASFAVQGLNTLDLVTLSGGHTFGRARCSTFINRLYNFSNTGNPDPTLNTTYLEVLRARCPQNATGDNLTNLDLSTPDQFDNRYYSNLLQLNGLLQSDQELFSTPGADTIPIVNSFSSNQNTFFSNFRVSMIKMGNIGVLTGDEGEIRLQCNFVNGDSFGLASVASKDAKQKLVAQSK

SEQ ID NO: 278556 - protein, 106 aa, Glycine max
  unsure (1)..(106): unsure at all Xaa locations
  Clone ID: PAT_MRT3847_93559C.1.pep
LEPIRHERSYIVVLVGSTDTWGSHRDAPTEAMARIMTASKGVRRTFVYTIQLQIVLQNYDRXHDNPFIGSVKFPHIPLPKMRICMLVDPKHFEEADTIGLAYMAVP

SEQ ID NO: 278557 - protein, 170 aa, Glycine max
  Clone ID: PAT_MRT3847_9355C.1.pep
MRFSLIMASHNIKIHDHLRVSPPSATEISLSLTFFDLFWLRFHPVERIFFYTLPTPHSNPSIFYSKLVPKLKTSLSRTLQHFPPLAGNVVWPDNTPNPTVQYTPGDSVSLVVAESEADFNHVLDNSPHEASELRCLVPHLDSSDSHASVVSFPITLIPNRGYSIGISTHH

SEQ ID NO: 278558 - protein, 139 aa, Glycine max
  Clone ID: PAT_MRT3847_93560C.1.pep
REQFHLWFDPTKDFHTYSVQWNPASIIFSVDGTPIREFKNLETKGVPFPKSQPMRIYSSLWNAEDWATRGGLVKTDWSKAPFTASYRNFNSQTSSSTGQSLDATGQAKIRWVQKNYMIYNYCTDIRRFPQGLPPECSIA

SEQ ID NO: 278559 - protein, 266 aa, Glycine max
  Clone ID: PAT_MRT3847_93561C.1.pep
MMKNIGLFLLVVVATFVVAATAGSFYQDFEITWGGERAKIYENGNLLTLSLDRASGSGFRSKKEYLFGKIDMQLKLVPGNSAGTVTAYYLSSLGPTHDEIDFEFLGNLSGDPYTLHTNVFSQGKGNREQQFHLWFDPTKDFHTYSVQWNPASIIFSVDGTPIREFKNLETKGVPFPKNQPMRIYSSLWNAEDWATRGGLVKTDWSKAPFTASYRNFNALTSSSTGQSLDATGLAKIHWVQKNYMIYNYCTDIRRFPQGLPPECSIA

SEQ ID NO: 278560 - protein, 138 aa, Glycine max
  unsure (1)..(138): unsure at all Xaa locations
  Clone ID: PAT_MRT3847_93562C.1.pep
LFFLGPTHDEIDFEFLGNLSGDPYTLHTNVFSLGKGNREQQFHLWFDPTKDFHTYSVQWNPASIIFSVDGTPIREFKNLETKGVPFPKNQPMRIYSSLWNAEDXATRGGLVKTDWSKAPFTASYRNFNALTSSSTGQS

SEQ ID NO: 278561 - protein, 237 aa, Glycine max
  Clone ID: PAT_MRT3847_93563C.1.pep
NNAGALSAPTIYENANLLTLYLDRASDSGFRSKKEYLIRKIDMQLKLAPENSAGTVTAYYLSSLGPTHDEIDFEFLGNLSGDPYTLHTNVFSQGKGNREQQFHLWFDPTKDFHTYSVQWNPASIIFSVDGTPIREFKNLETKGVPFPKSQPMRIYSSLWNAEDWATRGGLVKTDWSKAPFTASYRNFNSQTSSSTGQSLDATGQAKIRWVQKNYMIYNYCTDIRRFPQGLPPECSIA

SEQ ID NO: 278562 - protein, 274 aa, Glycine max
  unsure (1)..(274): unsure at all Xaa locations
  Clone ID: PAT_MRT3847_93564C.1.pep
MHLSLHQNTPLGILCCVPLLSYFLLLTQLVVPIAIVTNQLTKVYISSYHHQMKNIGLFFLVVVATFVVAATAGSFYQDFEITWGGERAKIYENGNLLTLSLDRASGSGFRSKKEYLFGKIDMQLKLVPGNSAGTVTAYYLSSLGPTHDEIDFEFLGNLSGDPYTLHTNVFSQGKGNREQQFHXPKSQPMRIYSSLWNAEDWATRGGLVKTDWSKAPFTASYRNFNSQTSSSTGQSLDATGQAKIRWVQKNYMIYNYCTDIRRFPQGLPPECSIA

SEQ ID NO: 278563 - protein, 231 aa, Glycine max
  Clone ID: PAT_MRT3847_93565C.1.pep
SQRKTKLILKLGIFISINGCRFLEPLTTGNYPQSMRSLVGKRLPKFSKQQTKSILGSFDFIGLNYYTSNYAIHEPQLRNAKPNYLTDFQAKLTTQRNGIPIGSNAASSWLYVYPKGIQELLLYVKKKYNNPLIYITENGIDEFNDPTLSIEEVLIDTYRIDYYYRHLFYLKSAIKDGANVKGYFVWSLLDNFEWANGYTVRFGMNFVDYKNGLKRYQKLSAKWFKNFLKKY

SEQ ID NO: 278564 - protein, 130 aa, Glycine max
  Clone ID: PAT_MRT3847_93566C.1.pep
VPKEAPSWVYVYPKGIQELLLYVKKKYNHPLIYIPENGIDEFNDPTLSIEEVLIDTYRIDYYYRHLFYLKSAIKDGANVKGYFVWSLLDNFEWANGYTVRFGMNFVDYKNGLKRYQKLSAKWFKNFLKKY

SEQ ID NO: 278565 - protein, 90 aa, Glycine max
  unsure (1)..(90): unsure at all Xaa locations
  Clone ID: PAT_MRT3847_93567C.1.pep
MKSQWDKKSGKMVSEAEIRQAQRGESPASGLAKWNXNPTNRVEQSTYSDYYFRITNSXDHMTXEFKEKFQRMXDKFMTKTRNIVPKLRES

SEQ ID NO: 278566 - protein, 57 aa, Glycine max
  Clone ID: PAT_MRT3847_93568C.1.pep
CVYILTGELPKHAVSDGTKGRHQIHQILIGSVSLYQGSLLARFNFGVSYTFLFTLSM

SEQ ID NO: 278567 - protein, 73 aa, Glycine max
  Clone ID: PAT_MRT3847_93569C.1.pep
QRLSGPVSTTFYLGYSLLMASSIIISTGTIDFLMSFYFLHYLFSSIKNDLSSCCHFLLTIKKVYLYNLITFHI

SEQ ID NO: 278568 - protein, 160 aa, Glycine max
  unsure (1)..(160): unsure at all Xaa locations
  Clone ID: PAT_MRT3847_9356C.1.pep
SLLRSYVAHNVNQPQEKDLLEGNFSFDIKSRSRLEKVSSTKAQFVSGKTFKYDIIGAGSHSPEDSPEKEDQEKPKKIDARLRQRIYPQFTAVQAHMETNSDKLPLDDVETTXGFMLDLKISQSKIALPQNTAGGTNLRSDLLXNPLTDGNLRAMCDLQRT

SEQ ID NO: 278569 - protein, 108 aa, Glycine max
  Clone ID: PAT_MRT3847_93570C.1.pep
FNCLPEQAWKLRGKKHGILCMWFGIWKQILCYLWHNNHLGSSLIPMQIQSRRLTMSLCKYPEAETVPLYIPFKSIDMFTLGGKHFCSYFAPSLYIITTSKGLLTLIYL

SEQ ID NO: 278570 - protein, 126 aa, Glycine max
  unsure (1)..(126): unsure at all Xaa locations
  Clone ID: PAT_MRT3847_93571C.1.pep
SLVGDNVGLLLRAVQQTHIYRGMVLLKLGTINSYTKFSAIVYVLKKEEGGRYSFLFVGHRFXFYMRIIDVTGKVMAIITDRDEESXMVMLGDRVKMVVELIVSVVCEXGMRFAIREGGKTVGVGVI

SEQ ID NO: 278571 - protein, 97 aa, Glycine max
  Clone ID: PAT_MRT3847_93572C.1.pep
MASSSISASGSWSVKDNKAFEKALAVYDKDTPDRWYNVAHAVGGKTPEEVKRHYELLVQDVKHIESGRVPFPNYKKTTSGSTDQEEKRLRNLNLNLQ

SEQ ID NO: 278572 - protein, 167 aa, Glycine max
  Clone ID: PAT_MRT3847_93573C.1.pep
LEIDFGLSDYVKPDERLNDIVGSAYYVAPEVLHRSYGTEADMWSIGVIAYILLCGSRPFWARTESGIFRAVLKADPSFDEAPWPSLSVDAKDFVKRLLNKDYRKRLTAAQALSHPWLVNHHDDMRIPLDMIIHKLGKAYICSSSLRKSALRALAKTLTVAQLAYLRD

SEQ ID NO: 278573 - protein, 57 aa, Glycine max
  Clone ID: PAT_MRT3847_93574C.1.pep
PSSSSFFISHITPLFLTSISLFFCGFLFWVFSFSSEVPKIKISAESLKIFQQKKELE

SEQ ID NO: 278574 - protein, 180 aa, Glycine max
  Clone ID: PAT_MRT3847_93575C.1.pep
MGGRMHTKSDSEVTSNSMEQSSPSRSPPRRPLYYVQSPSNHDVEKMSYGSSPMGSPHHHFHYYLSSPIHHSRESSTSRFSASLKNPRSNFSSSSSWKKLHPHPNPDAGLDDDDDDDDGDDDLNHFPRNLRLYFCFFLLFLLFFTLFSLILWGTSKSYKPRIIGKSLVFENLNVQSGNDGT

SEQ ID NO: 278575 - protein, 72 aa, Glycine max
  Clone ID: PAT_MRT3847_93576C.1.pep
LPTNILIIRQTHPLICHHFSILTHFHLKTILIFLYAKFFLPSYSPPIFTLPTIFFSLSLTIYGLFHIFFTCP

SEQ ID NO: 278576 - protein, 68 aa, Glycine max
  Clone ID: PAT_MRT3847_93577C.1.pep
PKWRGNLAWKWIFPHREIFCFGKHRIVPIFVSFKGIYNNPLSLKWGVYCKFRGLPKQKKTCLGVKKGR

SEQ ID NO: 278577 - protein, 51 aa, Glycine max
  Clone ID: PAT_MRT3847_93578C.1.pep
LPLFPITPAPLSIPGYHPNTNVTCKPGNLPMIHHSPLLFPTNINSLLLSPI

SEQ ID NO: 278578 - protein, 114 aa, Glycine max
  Clone ID: PAT_MRT3847_93579C.1.pep
NPWPFFSPFASLLEPPPHCPPLAAFFLGGLSGGLFVCSPPQFFFLVAWEPIGVFWVQGALNGPFPSSGGWVFMGGVFPFLFALAWFMRVFLVMVFFIYIYGLGPLLLALFPRFI

SEQ ID NO: 278579 - protein, 34 aa, Glycine max
  Clone ID: PAT_MRT3847_9357C.1.pep
SGDFSKPQQYDPTTCGCTLADLGWPPWDSPWPNP

SEQ ID NO: 278580 - protein, 110 aa, Glycine max
  Clone ID: PAT_MRT3847_93580C.1.pep
NLSFFIYFFFFNIFPGRGGPPGKSGRGPPGDPTFPRGGEKKTGPNQGQTGSREERGNRSLTPKKKRRAIKREKPRAPKKGPPPHKFGGPNRGVPKRETRGRIQKKKPGPP

SEQ ID NO: 278581 - protein, 180 aa, Glycine max
  Clone ID: PAT_MRT3847_93581C.1.pep
MEGRERKSSLTSQTEPLDYPHSRFFTPMQQQHSHEMVALKKAYADVILNTVKEAAGRVMVAERRALMFQQELASSKEEALHMLMRLKQMMDAKTAEAEKASLEQQRKIDELEAQLNEAEDIVTDLRAELKLVYLELETARNNQVQPLNGQNEKQVVTFQESAEPEISISSPHKELECVTS

SEQ ID NO: 278582 - protein, 47 aa, Glycine max
  unsure (1)..(47): unsure at all Xaa locations
  Clone ID: PAT_MRT3847_93582C.1.pep
RASLAWGIWFSSPRLLGVSGIRNXTIVMLLAGTVARPRDTPRAARAE

SEQ ID NO: 278583 - protein, 86 aa, Glycine max
  unsure (1)..(86): unsure at all Xaa locations
  Clone ID: PAT_MRT3847_93583C.1.pep
RXXXXXXFXXVXCXLXISXLXXXXRPXTXLXXDSSXAPDXTXXXYXXXRHFDXRIYXXXXLVYXSTXVXFSQARMTXXIXALXXRC

SEQ ID NO: 278584 - protein, 58 aa, Glycine max
  Clone ID: PAT_MRT3847_93584C.1.pep
AGKPGFLKHNKSIAHSKVGAGPTLPLSLTERGWYKQMGRLLSFPFKKGVVISARFRGI

SEQ ID NO: 278585 - protein, 153 aa, Glycine max
  unsure (1)..(153): unsure at all Xaa locations
  Clone ID: PAT_MRT3847_93585C.1.pep
PTPRRRGGPQTQRRNQREKTREERRKTERARRTNNGGGNEAPRSSEPTQPETPPGGETSPSYRDEXXQXPRRETXARATPTXRXXXRPTAXGXXTXAETPATQEEXXXEXDDEXAXGGXKEXKAPKKKEXKKQEREARXQAEEAAREXRQAKQ

SEQ ID NO: 278586 - protein, 86 aa, Glycine max
  unsure (1)..(86): unsure at all Xaa locations
  Clone ID: PAT_MRT3847_93586C.1.pep
NPSSLEXXXXXXXXXYXXXXXXXXXXXXFFFFXXXTTILGWTYLIKHTLNHPNLFPSIHITLNILKHFPSQQKMLTTTLTKPPENT

SEQ ID NO: 278587 - protein, 46 aa, Glycine max
  Clone ID: PAT_MRT3847_93587C.1.pep
KNTLRVTNFLNARHEARNINLTTLFPIICPLKYIVQGLFLDHQGSP

SEQ ID NO: 278588 - protein, 117 aa, Glycine max
  Clone ID: PAT_MRT3847_93588C.1.pep
RDRLFHEVENLAANSNGLAHKTQDVRGQKLKALEAQILDLKKKQESHVQLLKQKEKSEEAAKRLQTEIQYIKSQKVQLQHKMKQEAEQFRQWEASREKELLQLKKEGRKNEYERHNL

SEQ ID NO: 278589 - protein, 62 aa, Glycine max
  Clone ID: PAT_MRT3847_93589C.1.pep
IPTFLASREYVIGCTTFTEPSRIIHHGVALFVDCFETWDSHMTKFMVTSVTGAAVKDSDLYF

SEQ ID NO: 278590 - protein, 156 aa, Glycine max
  unsure (1)..(156): unsure at all Xaa locations
  Clone ID: PAT_MRT3847_9358C.1.pep
EYLKRTGFHCDIICVTGWTATPMQDVQVTIDRIISSQECVPRTYCVLNPQNPFVLNRWMGKLTLPQGTFRTVKIMPFSIGGGTDAMNAIYMNMPNAVLSMWRYFVGDLLVQDTTMTPTYMKXTFAFYLAEGWMADDTINPDALTRKLLHVVEITNR

SEQ ID NO: 278591 - protein, 179 aa, Glycine max
  Clone ID: PAT_MRT3847_93590C.1.pep
MAANPPAPSESDPNQNPGSESFPYFEDMNELETVFNRFDANGDGKISADELDSVLRSLGSGVSPEDLRRFMEDLDTDRDGFISLTEFAAFCRSDASADGGSGEFRDAFDLYDRDKNGLISAAELHLALNRLGLKCSVDECRDMIKSVDADGDGCVNFEEFKTMMTTSKNRGGATNGSVH

SEQ ID NO: 278592 - protein, 30 aa, Glycine max
  Clone ID: PAT_MRT3847_93591C.1.pep
MVEKAKGRKEEFFTHTYTINLHKRLHGCTF

SEQ ID NO: 278593 - protein, 58 aa, Glycine max
  Clone ID: PAT_MRT3847_93592C.1.pep
SFNRTLLVGLPVLEPLVFLHFNCIVYKAYFTVYFIVPPASLVYTGPPPPPPKKEDVIQ

SEQ ID NO: 278594 - protein, 98 aa, Glycine max
  unsure (1)..(98): unsure at all Xaa locations
  Clone ID: PAT_MRT3847_93593C.1.pep
DREGAWKHIQAGANKVLITAPGKGDIPTYVAGVNESDYRPDELIIXNASCTTNXHARCDKVLDQKFGVIRGTXMTTTYSYTGDQWLHDASQRDLTRAR

SEQ ID NO: 278595 - protein, 160 aa, Glycine max
  unsure (1)..(160): unsure at all Xaa locations
  Clone ID: PAT_MRT3847_93594C.1.pep
ILQKVNTASYLNCCLLTYLGIPIEANPKSSVPWDLIVKKCEHRLAKWKQKQLSFVERVTLIKSVLNTIPIYFLSFFKILKKVVHKLVKLQRWFLWGVDTEHKKIAWVSNGSACLSKEKGGXGNFRDLTKFNQALLGKWKWNLFYYQGELWARVLDSKYGG

SEQ ID NO: 278596 - protein, 57 aa, Glycine max
  unsure (1)..(57): unsure at all Xaa locations
  Clone ID: PAT_MRT3847_93595C.1.pep
QVRVYTPKRVFQELEVAKDEYIRANLSVRKDQKILLPKLXESFNKDSSLCPIGVNDM

SEQ ID NO: 278597 - protein, 43 aa, Glycine max
  Clone ID: PAT_MRT3847_93596C.1.pep
KETVSVESPLVSRTKKKARETVRTIEKLEVTMALTCLNSNIMP

SEQ ID NO: 278598 - protein, 72 aa, Glycine max
  unsure (1)..(72): unsure at all Xaa locations
  Clone ID: PAT_MRT3847_93597C.1.pep
EYVSLYYPTNACFQQDTELQAWWKEAVEKGHGDLKEKPWRGXCRHVTQLTQRCDYTAKTVYAFHAAINFGQF

SEQ ID NO: 278599 - protein, 239 aa, Glycine max
  Clone ID: PAT_MRT3847_93598C.1.pep
MWHFRGQGWSDIPEVGKLSFEESVSCLDRAVNLFCDIGRLSMAARYLKEIAELYEGEQNIEQALVYYEKSADFFQNEEVTTSANQCKQKVAQFAAQLEQYQKSIDIYEEIARQSLNNNLLKYGVKGHLLNAGICQLCKEEVVAITNALERYQELDPTFSGTREYRLLADIAAAIDEEDVAKFTDVVKEFDSMTPLDSWKTTLLLRVKEKLKAKELEEYELFVLHIHLQSVPALVLIELV

SEQ ID NO: 278600 - protein, 292 aa, Glycine max
  unsure (1)..(292): unsure at all Xaa locations
  Clone ID: PAT_MRT3847_93599C.1.pep
MADQLSKGEEFEKKAEKKLSGWGLFGSKYEDAADLFDKAANCFKLAKSWDKAGATYLKLASCHLKLESKHEAAQAHVDAAHSYKKTNINESVSCLDQAVNLFCDIGRLSMAARYLKEIAELYEGEQNIEQALVYYEKSADFFQNEEVTTSANQCKQKVAQFAAQLEQYQKSIEIYFEIARLSLHKNMLKYGVKLHLLNAGMASANSVKGXVVAITNALERYQELDPTFSGTREYRLLADIAAAIDEEDVAKFTDVVKEFDSMTPLDSWKTTLLLRVKEKLKAKELEQHEAIT

SEQ ID NO: 278601 - protein, 159 aa, Glycine max
  unsure (1)..(159): unsure at all Xaa locations
  Clone ID: PAT_MRT3847_9359C.1.pep
MLGMKRHRDNEGSESLDLAKCLVLFSCPIESNKAQQKGFGAVEFECKTCSRKFSSFQALGGHRASHKRQKLEGEELKEQAKTLSLWNKPKMHECSICGLEFSLGQALGGHMRKHRAALNEGFPIIPSIDQVIAKIPVLKRSNSTRVMCLDLXVTPVENE

SEQ ID NO: 278602 - protein, 83 aa, Glycine max
  Clone ID: PAT_MRT3847_935C.1.pep
RGDTDVLVRLTLAQLQQQQQQQSSTNAQQQQVQQQSLSNQQSQTSDHSMRQQDKVGGGGGGSVTVDGSMSDSIRGNDQVSKNQ

SEQ ID NO: 278603 - protein, 91 aa, Glycine max
  Clone ID: PAT_MRT3847_93600C.1.pep
FSGFKKKLDALLSEESLKTVPFLILGNKIDFPYAAPKKKLGFPLGVANFPPGKGNVNLSDFNGRPRGVFLSSFVKKMGFGDGFKWLSPAPK

SEQ ID NO: 278604 - protein, 290 aa, Glycine max
  Clone ID: PAT_MRT3847_93601C.1.pep
MADQLSKGEEFEKKAEKKLSGWGLFGSKYEDAADLFDKAANCFKLAKSWDKAGATYLKLASCHLKLESKHEAAQAHVDAAHCYKKTNINESVSCLDRAVNLFCDIGRLSMAARYLKEIAELYEGEQNIEQALVYYEKSADFFQNEEVTTSANQCKQKVAQFAAQLEQYQKSIDIYEEIARQSLNNNLLKYGVKGHLLNAGICKLCKEDVVAITNALERYQELDPTFSGTREYRLLADIAAAIDEEDVAKFTDVVKEFDSMTPLDSWKTTLLLRVKEKLKAKELEQHEAIT

SEQ ID NO: 278605 - protein, 153 aa, Glycine max
  Clone ID: PAT_MRT3847_93602C.1.pep
GNVINAQPWGSGGDNRELWNGRKTGEIKPDVKGAEPEKGSERFWKLLSKPLEGYQGGNNEVIERRNPLALAHFANHPPKGVQPNVMICPYDFPLTESNMRVYIPNVLFGNAEVNMRRFGSFWFKSGGGSRNSGSNVPTLKTLVLIATRPLQDE

SEQ ID NO: 278606 - protein, 49 aa, Glycine max
  Clone ID: PAT_MRT3847_93603C.1.pep
GSSNPTRPNGLTPKRAVFFAKDTPAWVMNKRKAARRLRHRRSITWNTDN

SEQ ID NO: 278607 - protein, 43 aa, Glycine max
  Clone ID: PAT_MRT3847_93604C.1.pep
LHYGHGTARSLTTYQYPNIFSIWVILGDMTAKRNVLYVYKELC

SEQ ID NO: 278608 - protein, 36 aa, Glycine max
  Clone ID: PAT_MRT3847_93605C.1.pep
SQILFSELEGVMVRKEKSMNGLLLRCSIGIQYSSAQ

SEQ ID NO: 278609 - protein, 59 aa, Glycine max
  Clone ID: PAT_MRT3847_93606C.1.pep
ICYILIIHLFFEDHQLQNAGADTIMALVLPYIPWIKNHKTNIYKFKEPYLLLNIQILTS

SEQ ID NO: 278610 - protein, 125 aa, Glycine max
  unsure (1)..(125): unsure at all Xaa locations
  Clone ID: PAT_MRT3847_93607C.1.pep
FCPCPCPCPSYPPLHSTPPSSSSPPXPRTLLCFLLILSTSIQSLLLFIIITITHRLNFSLSHKHFLSLIIPNICHLISFFLLLSILYLTTSILLVRVPFLLHSTISVTIIRVAFILLNLLLIKSP

SEQ ID NO: 278611 - protein, 506 aa, Glycine max
  Clone ID: PAT_MRT3847_93608C.1.pep
MAKCHQNNVGSIALDHRHSAKNATAAGHFRVLRRLIFDAVSCGGTSRYRYRQRGGDVSDGGDFSSAACHTEKEERSEKLSDLLNAAENKMAAAEEEKKKEEALAELKQVVKELREEDFRKQRIAAARVRSLAKEDSEARANLAVLGAIPPLVGMLDDSEDAHSQIASLYALLNLGIGNDANKAAIVKIGAVHKMLKLIESSGSDSSVSEAIVANFLGLSALDSNKPIIGSSGAIPFLVRTLKNLNESKIESKSQMKQDAMRALYNLSICQSNVSVVLETDLVLFLVSTIGDMEVSERSLAILSNLVSTPEGRKAISSVSDAIPILVDALSWTDSPECQEKASYVLMIMAHKAYGDRRVMIEAGVVSSLLELTLVGTTLAQKRASRILECLRIDKGKQVSGSYGGNFNLGVSAPICGSSSSSSKGCLVEEDGIMSEEKKAVKQLVQQSLQSNMIKIVKRANLRHDFVTSTHFASLTSKESPILKNNNEMKPFLIVVSLSFFLSSVAT

SEQ ID NO: 278612 - protein, 193 aa, Glycine max
  Clone ID: PAT_MRT3847_93609C.1.pep
FYSRKSKVTKPFEGKRTRFQSESQPQSVILLTKIKEFTRALLADLTNGRSPLILIDRFRSYCTLSNSNCFCASDLPCGKELLTLRRKSHAHRLAVMLRVMLIVQKLLQENKHSSKRDIYYTYPSVFLDQSVVDQAINDICILMQCSRHNLNVVSAGNGYKMRSQSILENSLFCQNFLNNNSSSSFIFTYNTIS

SEQ ID NO: 278613 - protein, 70 aa, Glycine max
  Clone ID: PAT_MRT3847_9360C.1.pep
KKVFKFGGPKWPNQTPWHLGSLFAIPNQSPVFKIPLEFPRISEIPGTILMPPFFVPQATARSSENAEPSA

SEQ ID NO: 278614 - protein, 163 aa, Glycine max
  unsure (1)..(163): unsure at all Xaa locations
  Clone ID: PAT_MRT3847_93610C.1.pep
DQKARSRWIKEGDCNSRYFHLMINSNHKSNXSNWSVNGSWVEEPNRVKEEVHRFFQQRFQEPLQTRPTLNGISFNSIGHQPNQLLVGTFSEEETKSAVWEYGSEKSPGPDGLNFKFIKQFWQTLKPVILRFLGEFHAHGTFPRGGNASFIALIPKVTDPTCLN

SEQ ID NO: 278615 - protein, 34 aa, Glycine max
  Clone ID: PAT_MRT3847_93611C.1.pep
TESRSVIERECLAAQKSEDSIRTAFSSSCSCTDA

SEQ ID NO: 278616 - protein, 68 aa, Glycine max
  Clone ID: PAT_MRT3847_93612C.1.pep
AAIFMRSVVGECHRRVRVCVHQLDVHVAFLGGDVMGGGGDHVNVNRYCVKVHSYHALRFGLNVGKSED

SEQ ID NO: 278617 - protein, 84 aa, Glycine max
  unsure (1)..(84): unsure at all Xaa locations
  Clone ID: PAT_MRT3847_93613C.1.pep
AGGSIQQSNSLLRPQSTSDVGIQSGMGYMTAQVSRPSNMSSLKRAASQPLSSXVPESXQEDSTKSVXTPSIXXWXXXGPXSXQT

SEQ ID NO: 278618 - protein, 91 aa, Glycine max
  Clone ID: PAT_MRT3847_93614C.1.pep
YVTKYRRVVSAQTHREEIIQDLYNTHEDPVRGKTHSGIIRYWGHGIDVVFLLRLTVKKSSNCFSCLCFFRELLRAFRLSTKTKPERIIFYR

SEQ ID NO: 278619 - protein, 192 aa, Glycine max
  Clone ID: PAT_MRT3847_93615C.1.pep
QAYGDIQLMPFVDYYSLISLKTIAICIMGTKIIPSKYIMKTDDDAFVRIDEVLSSLKGKPSEGLLYGLISSKSSPQRDEGSKWYISEEEWPHDTYPPWAHGPGYVISRDIAKFIVHAHQERKLKLFKLEDVAMGIWIEQFKNDGKEVHYENDERFYNAGCESNYVIAHYQSPRMVLCLWEKLQKEHQPVCCE

SEQ ID NO: 278620 - protein, 82 aa, Glycine max
  Clone ID: PAT_MRT3847_93616C.1.pep
GFCYIWTHITVFCVADSREKKSAVLLLDMSLFYDFPMGMELFHRPIQKIAPAPQLISIPSYSYTLSKTQMTAYILLWSEQNH

SEQ ID NO: 278621 - protein, 83 aa, Glycine max
  Clone ID: PAT_MRT3847_93617C.1.pep
SLTNFGFFSTPVFLQPSIRHKPKICSESYLRFDLLFRISRCWNCVIWSRKFTHLSRPLAEFLQRVTKVQARSMYNHGSARAES

SEQ ID NO: 278622 - protein, 56 aa, Glycine max
  Clone ID: PAT_MRT3847_93618C.1.pep
ISTRIAAKPHRYNIPYVKQEFLKNNANGVFPINKFGYKACLTHLNFQNRLLKPPKL

SEQ ID NO: 278623 - protein, 73 aa, Glycine max
  Clone ID: PAT_MRT3847_93619C.1.pep
VQREQGRIHPLWIFACKWIFTRLKEISRTAGRLGTGCRHGLLPNQYKNSCVFVSFFPTLLLSAVHLISAFTFC

SEQ ID NO: 278624 - protein, 29 aa, Glycine max
  Clone ID: PAT_MRT3847_9361C.1.pep
TLHSYYVNLQCIKTMNIHLHLTIYTNTNH

SEQ ID NO: 278625 - protein, 69 aa, Glycine max
  Clone ID: PAT_MRT3847_93620C.1.pep
SSVNSYYLQNLEDHDTEDLFTTGSIILMLLTSFTCHKCIQPYTLKTYTHGHTTSQETFILLSFVALQNR

SEQ ID NO: 278626 - protein, 157 aa, Glycine max
  Clone ID: PAT_MRT3847_93621C.1.pep
DIFWDALGGKAEYPKGKEIQGFIDDPHLFALKIARGKPYFKVKEIYNYTQDDLITEDILLLDCQREIYVWVGLHSAIKSKQEVLHLGLKFLEMDVLVEGLSMNIPIYIVTEGHEPPFFTRFFSWDHSNENIVGNSFERKLAILKGKPKTLEGHNRTP

SEQ ID NO: 278627 - protein, 753 aa, Glycine max
  unsure (1)..(753): unsure at all Xaa locations
  Clone ID: PAT_MRT3847_93622C.1.pep
LLEVVQYIKENKHGGKCEVATIEDGKFVGDSDVGEFWSLFGGYAPIPRDSPCVQESETPPVKLFWINLQGKLCETGSNAFSKEMLETEKCYMLDCDGEIFVWMGRQTFLTERRTAIIAVEEFVRNLEPNRLEEGRSNKTHLTFLSEGLESTIFRSYFTNWPKTVEPRLYEEGKEKVAAIFKHQGYEVKELPEEDNEPSIDCSGTIKVWRVDGDELSLLSVAELTKLYSGDCYIVQYTFLGNGRDETLFYAWLGSKCVMEDKAAAISHMSTMADSIRTNPVMAQIHEGKEPAQFFSILQRLIILKGGNSSGYRKFIEEKGIVDETYNENLVALFRVQGTSPDNMQAIQVDQVSTSLNSSYCYILQSKASIYTWIGSLSSARDXVRERDEPDIFWDALSGKAEYPKGKEIQGFIDDPHLFALKITRGKKGTLLRKVLXDSIAVDLSWLECQRELDLLIVLLLALNCWNDNSRVVKVYEVFNYTQDDLSIEIVLLLESQRDVYLLVTLLFAVESSHEALILDLKFLEMDVLVEGLSLNIPIYIVTXEGHEPPFFTRFFSWDHSKENIFGNSFERMLAILKGKPKSLEGHNRTPLKANSRPSTPDXTEALSVFSNGRGRSSSPIPSSAGSDLRQSGDRSLSSSTPVVKKLFEGSPSQSSAGKTMPQSGSPATELSSSDETASFPQKDRNVDGENTAIYPYERLRVVSANPVTGIDLTKREVYLSNEEFREKFGMPKSAFYKLPRWKQNKLKMSLDLF

SEQ ID NO: 278628 - protein, 50 aa, Glycine max
  Clone ID: PAT_MRT3847_93623C.1.pep
FMRIMYVLFWGEGAKLDHIKLFITKSYHYLFPIHLRKQILLPLPQGGDKF

SEQ ID NO: 278629 - protein, 117 aa, Glycine max
  Clone ID: PAT_MRT3847_93624C.1.pep
RCAFKLCHACMVYHCAFPKHPCTCCLLRPAPGCRRFIVTSALGGPGRNANYIPAMGWGSPVFPYGGFYGPILPHGSFSHSAWYPIPLARPRRRPNLASPSRLGFGGDRTLGQFDRDS

SEQ ID NO: 278630 - protein, 45 aa, Glycine max
  Clone ID: PAT_MRT3847_93625C.1.pep
NRKQCYQQAWVRHVDVTERALIKILRLHLLYTAQDKLPGLFTMMV

SEQ ID NO: 278631 - protein, 96 aa, Glycine max
  unsure (1)..(96): unsure at all Xaa locations
  Clone ID: PAT_MRT3847_93626C.1.pep
XFLASFLLXSPXFPFLPSXXSXXXXFXXSVLXXSXLXXAXFFXSLXXYXXIFXXXFXXFXLSPSXILTXLXXXXXXIPXXXALXXSXXIPXXXTXH

SEQ ID NO: 278632 - protein, 35 aa, Glycine max
  Clone ID: PAT_MRT3847_93627C.1.pep
QAMASVGQAVVRSYSLLASGSTLISCLLMVEAFPG

SEQ ID NO: 278633 - protein, 122 aa, Glycine max
  unsure (1)..(122): unsure at all Xaa locations
  Clone ID: PAT_MRT3847_93628C.1.pep
FYKTNSFNNVSSNTNIFSNINRFNNISLNTNILNNIKRFNNFSTSTNIFNNINSSNNXFYKTNSFTNVSSNTNIFNNINRFNNISLNTNSLNNINRFSNFSTNTNIFNNHATAANKLTDSGT

SEQ ID NO: 278634 - protein, 56 aa, Glycine max
  Clone ID: PAT_MRT3847_93629C.1.pep
PFHLWFFIIHIHKGLHHARPSYSRILHITFCPKGKNIIVHIGYSHHVKNGVFKLKT

SEQ ID NO: 278635 - protein, 323 aa, Glycine max
  Clone ID: PAT_MRT3847_9362C.1.pep
MRHMVRVAMSQAQKRTRLSGDTNFSRLICARADEDHLDGLYVGAFGPYGMVIVELGRKNEDTPVKDEFIRLPAEIKNMEKDSFDFHLDCGNVDYGIKEDKIPNIKVAALAAQGISELMPPDVANAFWSSDKVSSRISKSMRDIVRVAMSQAQKRTKLSGDTNFSRIICSRGDSDPFDGLYVGAFGPYGMEIVHLRRKFGHWNEVDNENKTSDVGFFEYVEAVKLTGDLNVPAGLVTFRAKIGRGNRITNQGMYPDDLGVVASYKGQGRIADYGYRNPKWVEGELLQLNGKGMGPYMKGADLGFLYVVPEQSFLVLFHRLKLPE

SEQ ID NO: 278636 - protein, 56 aa, Glycine max
  Clone ID: PAT_MRT3847_93630C.1.pep
SYKCKGSTPAPCDMSIGLYKPNHIVKIFINVQMSTWKILMYQHNDATQKKKKFNYY

SEQ ID NO: 278637 - protein, 70 aa, Glycine max
  Clone ID: PAT_MRT3847_93631C.1.pep
SRAAVLFFFFFFFWGVFKSLPHFFHVTSLGFFVNFVVLEIKPPLGLPFGDCFHCPMGGDFWQMSNLGGDL

SEQ ID NO: 278638 - protein, 82 aa, Glycine max
  unsure (1)..(82): unsure at all Xaa locations
  Clone ID: PAT_MRT3847_93632C.1.pep
CPVIPNALEKCERITKAFKPXLVXVNCYRPYFPQAPWGGIKPSGFGRDXEKWGLNNSLSVNRVTPYIFDNPWGWFQFPSRVL

SEQ ID NO: 278639 - protein, 50 aa, Glycine max
  unsure (1)..(50): unsure at all Xaa locations
  Clone ID: PAT_MRT3847_93633C.1.pep
SQSLELWNMAENKXNVNSPAPECVISALAQSPLTGMVASASHDKSVKIWK

SEQ ID NO: 278640 - protein, 82 aa, Glycine max
  Clone ID: PAT_MRT3847_93634C.1.pep
VFGIAYRQPNLVSMSSHTAGNQCFELVTRHKRLGLALSSSRTMTISFFKTPVSTTKREPEGTEWVGSEPTASKLSGRVGRPG

SEQ ID NO: 278641 - protein, 77 aa, Glycine max
  unsure (1)..(77): unsure at all Xaa locations
  Clone ID: PAT_MRT3847_93635C.1.pep
MKMIHVLFLFALVSITYHASDRDFCVAHLKXGPDTHSCYQLKPPNTVTVDDXVHSGFVAGNTTNTFSAALRSAIVTD

SEQ ID NO: 278642 - protein, 172 aa, Glycine max
  unsure (1)..(172): unsure at all Xaa locations
  Clone ID: PAT_MRT3847_93636C.1.pep
ILFVKXNNEESCKNTRFKRLALMDYTAGQKKKKMKALIPXIIQAIYFGVLSILXRGSLDCYSLVSFVTSLLFLIQPIQDVGKAYNECRQGEPAAERLLAMSRFKXRVVEKPDAADLXLDRVTGDLKFNXDDMPLVLXNGLNLHIRPGETVAIVGPSGGGACDFLSLGNSYDG

SEQ ID NO: 278643 - protein, 95 aa, Glycine max
  Clone ID: PAT_MRT3847_93637C.1.pep
MDGREAMAFSDGSAPYYMHRVGVGGSGCGFQPATVFRPWSNTGMQAESNARGGQGQGGGPEGPNFPLSETPPQGHANCNHGITIGAPASGPAKKK

SEQ ID NO: 278644 - protein, 73 aa, Glycine max
  unsure (1)..(73): unsure at all Xaa locations
  Clone ID: PAT_MRT3847_93638C.1.pep
XQKQGTEAMRRXIPVLVHPRFLLLFLVLSIFLIFTFSGSTTTXSFTNPKXVVEIIVXEXRXRARXYTXXXFXY

SEQ ID NO: 278645 - protein, 121 aa, Glycine max
  unsure (1)..(121): unsure at all Xaa locations
  Clone ID: PAT_MRT3847_93639C.1.pep
AXXXCHPXXGXRXGQLXXSXXVXSSHNXXXXXXXXXDXRSXXXVXXLCRXTXGXVXRHXHXXXLXVRXXXXGIXXXXXXXXXVXXFXXVXXXRXXXXXXXLXXXXXXLXXXXXXAWXVXFX

SEQ ID NO: 278646 - protein, 87 aa, Glycine max
  Clone ID: PAT_MRT3847_9363C.1.pep
VRCPRRCEKSTEPYHLEEEEKLKDLAEAFEMYHDSEMFGFITPKSLQKMLGRLGESKSMEQCTAMIGHFDLNGDGLLSFDEFRVMMQ

SEQ ID NO: 278647 - protein, 100 aa, Glycine max
  unsure (1)..(100): unsure at all Xaa locations
  Clone ID: PAT_MRT3847_93640C.1.pep
TIPFTRCXTILPMELNLGGRQKFXNLVSGIMKKRDKLSCQVGINPYFMERTGLANILLRKVNNILSCDYARFGGLTTKQVINIFSQGMHKMNSAWIPNPP

SEQ ID NO: 278648 - protein, 242 aa, Glycine max
  unsure (1)..(242): unsure at all Xaa locations
  Clone ID: PAT_MRT3847_93641C.1.pep
SISSIGTTITRSISQVLEKTISSAITESFQKGVGDKALNHLEMPVSSKLEATVARQIQAQFQTSGKQALQEALKSSIEASLMKXLGFATKSKVAADPFVAQINNGLHQMIEDPTKELSRLISEGKFEEAFTGALHRSDVSIVSWLCSQVDLARILAMVPLPLSQGVLLSLLQQLSCDINTETPKKLTWMTDVAAAINPADPRIAAHVRQILDQVSRTLGHLRIFATAIKPRSGSVSSTTVVL

SEQ ID NO: 278649 - protein, 199 aa, Glycine max
  Clone ID: PAT_MRT3847_93642C.1.pep
STSATFLRVVGSDLIQKYLGDGPKLVRELFRVADDLSPSIVFIDEIDAVGTKRYDAHSGGEREIQRTMLELLNQLDGFDSRGDVKVILATNRIESLDPALLRPGRIDRKIEFPLPDIKTRRRIFQIHTSRMTLADDVNLEEFVMTKDEFSGADIKAICTEAGLLALRERRMKVTHADFKKAKDKVMFKKKEGVPEGLYM

SEQ ID NO: 278650 - protein, 63 aa, Glycine max
  Clone ID: PAT_MRT3847_93643C.1.pep
PPQMLEWGGLKGGRPLCKRVLGIPKGPFKGRGFGGGIVPQGGFSIFWGATQVSFFSGQKDPSP

SEQ ID NO: 278651 - protein, 48 aa, Glycine max
  Clone ID: PAT_MRT3847_93644C.1.pep
LIRIRIAKLKDEGPSNDVEGPPRKGSRTYKNGKEINRKRWKEEEAMLA

SEQ ID NO: 278652 - protein, 211 aa, Glycine max
  Clone ID: PAT_MRT3847_93645C.1.pep
MVSANKEMVVYCFDTLLAHYNSTEAPSPAFDQAQHPLFVTWKKVVNGGDPRLRGCIGTLEARSLINGLKDYALTSALRDRRFPPIQVNELPLLECTVSLLTDYETANHYLDWEIEKHGIIIEFSDPVYNTRCSATYLPEVAANEGWTKTEAVDSLIRKAGYNGPITDELRMQIQLTRYQSTLFTMHYSEYVSYVKERRGEAPILAAKSPNY

SEQ ID NO: 278653 - protein, 42 aa, Glycine max
  unsure (1)..(42): unsure at all Xaa locations
  Clone ID: PAT_MRT3847_93646C.1.pep
LTXSLHYIFFSNFSLILLITNITFLTSYPINTFKTTYIITSL

SEQ ID NO: 278654 - protein, 56 aa, Glycine max
  unsure (1)..(56): unsure at all Xaa locations
  Clone ID: PAT_MRT3847_93647C.1.pep
VPIFLSYELSVVFQLLKISASVWNGESFLIDVMPRQVILKXKKKSEMQPVQNKKDQ

SEQ ID NO: 278655 - protein, 157 aa, Glycine max
  Clone ID: PAT_MRT3847_93648C.1.pep
METRSRKRAEASSAAPSSSCTTPSRSAKRSRLSSSSSSILPVNTRSRSARNNNNNNNSGSISFMDPTNESSGSRRDRRGKNFDRENSDKGKEKEQDVRIRDAERERERALALNMESEDVGDDDDNDSDGGGGILLQDLTCAGGALRRLVGELGAGGG

SEQ ID NO: 278656 - protein, 95 aa, Glycine max
  Clone ID: PAT_MRT3847_93649C.1.pep
PLPCVCSRFWHPEFFFLWFPVFFCVDPGFHNSFFLGTGLPLVPPPFIPFVLRELVSLRVPVWFFWVVPGVPPRVGPGVLKHKKYLQKKHHIISEK

SEQ ID NO: 278657 - protein, 78 aa, Glycine max
  Clone ID: PAT_MRT3847_9364C.1.pep
QHIISARQNETRIHYLFLHNNKMNSSTLFLLSFTLSLILISPLPTLGTSLYESLCDNAGVDKARCLEVLKAEPSNCWG

SEQ ID NO: 278658 - protein, 73 aa, Glycine max
  Clone ID: PAT_MRT3847_93650C.1.pep
MEDKLATTSEGQPIRCKAAICRKPGSPLSIEEIIVAPPMPREARIRVICTSLCHSDVTFWKMEVITIIFFLFE

SEQ ID NO: 278659 - protein, 59 aa, Glycine max
  unsure (1)..(59): unsure at all Xaa locations
  Clone ID: PAT_MRT3847_93651C.1.pep
RSPPQGGGAXAKKLXQEMPXAVFQWEIFRXDLALKFLKTSPTLNDSLFLHSIEIWLMTP

SEQ ID NO: 278660 - protein, 330 aa, Glycine max
  Clone ID: PAT_MRT3847_93652C.1.pep
MIAPQFSRSTLGTISERVNYRKLDMILLGTSCFSTLPSTASAYPSLPLGPYFKQHKPLLYSKPSKFNSLVINGHRRICDLFDLHQEQVPYEVAWFWQKEIVREKKAHIEKEGDCTDTLIILQHPSVYTLGTASTEGNLKFDMKDAPFNIYRTERGGEVTYHGHGQLVMYPIINLRRHKMDLHWYLRTLEEVVIRVLSSAFSIQASRLEGLTGVWVGNEKLAAVGIRVSHWITYHGLALNVTTDLSPFKWIVPCGIHDRQVGSIKGLVREGKQCIIDHGTTDLHQLDDASLIHTTHKSLIEEFSQAFQLEYCYKSISAALLYESKQSSLTK

SEQ ID NO: 278661 - protein, 50 aa, Glycine max
  unsure (1)..(50): unsure at all Xaa locations
  Clone ID: PAT_MRT3847_93653C.1.pep
INHSFFFFLLXWDXLIGFGVSSSYDHSLIIPNSNIQFTRFKKKKKKKTRD

SEQ ID NO: 278662 - protein, 59 aa, Glycine max
  unsure (1)..(59): unsure at all Xaa locations
  Clone ID: PAT_MRT3847_93654C.1.pep
IPITGSGIFRDCTLVADILXNKHLGWYERWIFWVGPFIGTALTALCHEVVIRTIPFKCE

SEQ ID NO: 278663 - protein, 426 aa, Glycine max
  unsure (1)..(426): unsure at all Xaa locations
  Clone ID: PAT_MRT3847_93655C.1.pep
MEVELKELHADLQSLSQSLPDPSHHDLLRKIQLRVGDLAKLAEAAPVRRSKVEDMSAEVVDSNPYSRLMALQRMGIVDNYERIRDFSVAIVGVGGVGSVSAEMLTRCGIGRLLLYDYDKVELANMNRLFFRPDQVGMTKTDAAVQTLSDINPDVVLESYTLNITTVTGFETFMSSLKNKSLRPNKQGSGVDLVLSCVDNYEARMAVNQACNELSQTWMESGVSEDAVSGHIQLLIPGETACFACAPPLVVASGVDERTLKREGVCAASLPTTMGVVAGLLVQNTLXLLLGFGQVSPYLGYNSLKDFFPTMQMKPNPQCSNVACLERQEEYLFAKPARDAAAKAKMEAEAPSTEEVPLHEENEWNISVVDDIELDGPDTRSSDVLPEGLTHELPTADEFHKATLDAPVVDNDDLEDLRRQLEAINSP

SEQ ID NO: 278664 - protein, 72 aa, Glycine max
  Clone ID: PAT_MRT3847_93656C.1.pep
HSPQHTTRWNKKHTLRGLMGGPPPINCVCLPPPFLTGKPFGPPVFLIHPPPRGGGVFFLSPPRFFFFPRDAP

SEQ ID NO: 278665 - protein, 63 aa, Glycine max
  Clone ID: PAT_MRT3847_93657C.1.pep
KLKTIDITYSETSNSEYTHCTRIHQTRVVVVLQWISTSIHKNSILYLCSPINASSTCDCQGEP

SEQ ID NO: 278666 - protein, 146 aa, Glycine max
  unsure (1)..(146): unsure at all Xaa locations
  Clone ID: PAT_MRT3847_93658C.1.pep
WLVFLSQIPHNAHYLSRRTGVHGSVFHISCEVQAPYVILSSYACLMSGLNXLLIDLLRGFYISPPQMDKLGHHMMXNSVTLPPLKAPLMVELWGGTRTRISLQCLLVYVXMGIDPLILHAGELDCLRTRLPTNLDMLTYPLAVDRS

SEQ ID NO: 278667 - protein, 54 aa, Glycine max
  Clone ID: PAT_MRT3847_93659C.1.pep
MGVVTVGELKTSISGKRTFRPSSSIRHATEWPISDVSSDLTIEVGASSFALHKF

SEQ ID NO: 278668 - protein, 58 aa, Glycine max
  Clone ID: PAT_MRT3847_9365C.1.pep
HIEVKYHFLCDQVNKNKLALEYSKTEEQCADMLTKALKPKRLEEMKNKIGMHKLTNLN

SEQ ID NO: 278669 - protein, 193 aa, Glycine max
  Clone ID: PAT_MRT3847_93660C.1.pep
NELGCLTSCVGTRWFRAPELLYGSTDYGLEVDLWSLGCVFAELLTSKPLFPGTSDVDQLSRIVSVLGNINEETWPGCSKLPDYGSISLGNVENPSGLEACMPNCSPNEVSLVQRLVCYDPAKRTTAMELLQDKYFSEEPLPVPISELRVPLTRNGQDQDSPGGHNEMGSDSDLEELGTLEYTTTGFYLSIQIP

SEQ ID NO: 278670 - protein, 130 aa, Glycine max
  unsure (1)..(130): unsure at all Xaa locations
  Clone ID: PAT_MRT3847_93661C.1.pep
SHPDRGREGGERVFEETKMTPPYIKCTGSLFIALGNSADDTINFEALPHKLEQLGEIQEKXVYMKFSQEEFLTARTTQVRPATTLSADGSPYLYAMVHDRSESTVPGDCAIGVKLTTIHNMCAYGLNPGI

SEQ ID NO: 278671 - protein, 141 aa, Glycine max
  unsure (1)..(141): unsure at all Xaa locations
  Clone ID: PAT_MRT3847_93662C.1.pep
VFIFDSFARPDWNIVGAMLLVDTYHTNTENAVRIICGAPFKGGRPIRVATFANTMGQIEPDVNSWVQLKRTTTNGDCAQGKDLAMAKVNDDSAAVGLTSSNTPTPVEESELQKDRWLIEEYFGRRSYCGHTVXKPQEKDLS

SEQ ID NO: 278672 - protein, 103 aa, Glycine max
  Clone ID: PAT_MRT3847_93663C.1.pep
MSPTHTNTNSDTQLRIQERALSAAGAAFVSAIIVNPLDVAKTRLQAQAAGVPYQGVCQMAPFQTNTTPHDIRWSAVSSSEPPLPCPSVCNRYKGTLDVLYKVT

SEQ ID NO: 278673 - protein, 98 aa, Glycine max
  Clone ID: PAT_MRT3847_93664C.1.pep
GLCAYLSPTFENLCKRMISNLNVTKRLFQLCYLGNIFTLIAVYQTTPLEPLNIPVLFLPEYPNCLKNNYLICNHADAPPLDSTQPTCPIWEFSYAPYK

SEQ ID NO: 278674 - protein, 53 aa, Glycine max
  Clone ID: PAT_MRT3847_93665C.1.pep
FLRTKIGFLLTLIPQSFKFTLFGLSVCLEYDVAAGGGTRERRGGETCRRTWRP

SEQ ID NO: 278675 - protein, 63 aa, Glycine max
  Clone ID: PAT_MRT3847_93666C.1.pep
YKEFKFIITHERVFKHKHYIENVFSPSTTNCCCKKKKKLKYSNILQEIVQLTTSFIKTINCSK

SEQ ID NO: 278676 - protein, 162 aa, Glycine max
  unsure (1)..(162): unsure at all Xaa locations
  Clone ID: PAT_MRT3847_93667C.1.pep
RKQRSIINFLVNCTAGTMFYKSIDPSNFVKSGEKTFELLDSIVEEIGEEKVVQVITGNGSNYVLAGKFLERKRSHLYWIPCAAHCIDLMLEDIGKLPLIKKTILRAISLVGFIYSHSSTLSLLRFFTNKRELVRHXITRFATSFLTLERLHKEKGNLRKMFV

SEQ ID NO: 278677 - protein, 110 aa, Glycine max
  Clone ID: PAT_MRT3847_93668C.1.pep
IETSKKKSFEDKKTSLESEGEALALAALCCVISIRERKGWLLVFETKLNDEVTKVVCLSCWGWSVFGMKDAVKSVVLRQMCVVSVLYGDDDEDGYGFGEIHSRRESTAAV

SEQ ID NO: 278678 - protein, 75 aa, Glycine max
  Clone ID: PAT_MRT3847_93669C.1.pep
IRRIRCHHNGKSYMDSRASLALGNVLLKFPKEARFHIRWLLYRPYMIGHPCPSSMIIYASWCLHNVVLASSDRIS

SEQ ID NO: 278679 - protein, 124 aa, Glycine max
  Clone ID: PAT_MRT3847_9366C.1.pep
MAGATPSCVFCAIAAKSTSSDTLLYSDDKGVAFQDINPSAFRHYLVVPVAHIPTVKYLQRKTDDYSLVSHMLEVGKTLLNRDAPHSQQYRFGFHQPTLNSVNHLHLHCLSLPYTPRWRSIKYLS

SEQ ID NO: 278680 - protein, 67 aa, Glycine max
  Clone ID: PAT_MRT3847_93670C.1.pep
LGVIRHKSICRALSAIRHLSSASKEMTVRDAVSSALDEEMSADPKGVLMGEEVGEVSGAYRMMKGLL

SEQ ID NO: 278681 - protein, 23 aa, Glycine max
  Clone ID: PAT_MRT3847_93671C.1.pep
TRKCLLGILLYMINNGFGLHKAC

SEQ ID NO: 278682 - protein, 210 aa, Glycine max
  unsure (1)..(210): unsure at all Xaa locations
  Clone ID: PAT_MRT3847_93672C.1.pep
YSEFLXXXVEXCENPEQGAEFAKILDDSGDVIVLGKAVFLRPEEVAKSIESLIYQSIANPNDPRRRELEQMEKQKWMIDEKAKAQVRAELYFGLGFLTVQTLGFMRLTFWELSWDVMEPICFFVTSFGFALAYLFFLKTSTEPTFQGFFHHRFKAKQERLMKTHNFDMSRYNELFKACYTNYHGGAKFESSYPFHYLGETHLTDLRALHR

SEQ ID NO: 278683 - protein, 118 aa, Glycine max
  unsure (1)..(118): unsure at all Xaa locations
  Clone ID: PAT_MRT3847_93673C.1.pep
GLTCSRKTCTMGTGCNDGCLTXILPHAMNVLFSKLGTLKHQIDYQLPVSFIEILNEEVXDWLHPFSMSKPETANGHAGKMTSTEKPPIQICETSNGVITLAXSTEISVSTLIEMAACL

SEQ ID NO: 278684 - protein, 59 aa, Glycine max
  Clone ID: PAT_MRT3847_93674C.1.pep
GLNVEYSFMALSSTSHVTVLPCLLMGSAGGTDYGAYTYELSEEPDWLSRKLSIPSQVRG

SEQ ID NO: 278685 - protein, 33 aa, Glycine max
  Clone ID: PAT_MRT3847_93675C.1.pep
GKLQLPPIVQLLCLRHHANQDLLIALIKKLHSQ

SEQ ID NO: 278686 - protein, 238 aa, Glycine max
  Clone ID: PAT_MRT3847_93676C.1.pep
MASRGTGTLILVCLLWLFFLCATIAFLQLNFVDKGTTNNNPSSRSSNFIATQQHSADTPLEQDLEGVTHKVYFDIQIHGKLAGRIVMGLYGNTVPKTAENFRALCTGEKGVGRSGKSLHYKGSTFHRIIPSFMVQGGDFTRGDGRGGESIYGDKFADENFKLKHTGPGYLSMANSGEDTNGSQFFITTVKTSWLDGRHVVFGKVLSGMDVLYKIEAEGSESGSPKNKVVILDSGELTS

SEQ ID NO: 278687 - protein, 43 aa, Glycine max
  unsure (1)..(43): unsure at all Xaa locations
  Clone ID: PAT_MRT3847_93677C.1.pep
NIICRALPDISLVRTARVPAQSIRAHKVNYLAFTKPXNSCRAV

SEQ ID NO: 278688 - protein, 220 aa, Glycine max
  Clone ID: PAT_MRT3847_93678C.1.pep
FGFKGALNFVDKGTTNNNPSSRSSNFIATQQHSADTPLEQDLEGVTHKVYFDIQIHGKLAGRIVMGLYGNTVPKTAKNFRALCTHLISGEKGVGRSGKSLHYKGSTFHRIIPSFMVQGGDFTRGDGRGGESIYGDKFADENFKLKHTGPGYLSMANSGEDTNGSQFFITTVKTSWLDGRHVVFGKVLSGMDVLYKIEAEGSESGSPKNKVVILDSGELTS

SEQ ID NO: 278689 - protein, 82 aa, Glycine max
  Clone ID: PAT_MRT3847_93679C.1.pep
FAPKSSQSYAVRSNHSIRLVFTLSPNVVPIKNKCLYLYNSVGIHEPIPGLWVGFHKLCDPGRPDVGPGEGPYRFYRERALYM

SEQ ID NO: 278690 - protein, 139 aa, Glycine max
  unsure (1)..(139): unsure at all Xaa locations
  Clone ID: PAT_MRT3847_9367C.1.pep
MITPRRTFPPPGALARLKRNQKTAPRKGLKKRSKGWGKKPKAPPTPLLALQKNHPPPPKVGRNQPGELFFPLPGKKKKXGAKPPPPRKEXHGPNGEPPPPPSPKKKKKKKKKKKKKKKKKKKKKKKPKKKKKKKKKKNQ

SEQ ID NO: 278691 - protein, 62 aa, Glycine max
  Clone ID: PAT_MRT3847_93680C.1.pep
ARALNLFTKMSYTHQPFMYVETTMWLFNGILYQQSLRETKSTGIRYAQRARRRKHLIRGYFR

SEQ ID NO: 278692 - protein, 132 aa, Glycine max
  unsure (1)..(132): unsure at all Xaa locations
  Clone ID: PAT_MRT3847_93681C.1.pep
IDGMGVTGVEGVFXRCCEETLLLYADKQKKALLTIVEVFIHDPSYKWALSPLKALQRQKEMDDDLDTSLEEPQHDCQGNKDAARALLRVKQKLDGYEDGEMRSIHGQVQQLIQDAIDSERLCQMFPGWGAWL

SEQ ID NO: 278693 - protein, 87 aa, Glycine max
  Clone ID: PAT_MRT3847_93682C.1.pep
RDLGEGHFGKVSLYYYDPTNDGTGVMVAVKAHKASCGPQHRSGWNTRSPFCTRSSTSTCIKYKGCCEDQGEKSLQLVMEYVPLGSLR

SEQ ID NO: 278694 - protein, 74 aa, Glycine max
  Clone ID: PAT_MRT3847_93683C.1.pep
SWVGEFASNSAASSFFIIRQKGVNNFPSVHGFEHITKVTFCHTICTSGPFGVFGLFKAMNLGWFPVQGFIAFFA

SEQ ID NO: 278695 - protein, 111 aa, Glycine max
  Clone ID: PAT_MRT3847_93684C.1.pep
PRCSHFQLLPIFWSRHLYPRGAWQIHPMQNVNFWWHSKPAEVEGWPFYRALKWIGKLGYQNVIFESDCKMVVGNFASNSSWVIDLHVILFKCIPLFSNLSNCKGEFLLGTK

SEQ ID NO: 278696 - protein, 212 aa, Glycine max
  Clone ID: PAT_MRT3847_93685C.1.pep
MKEAGSGDPALFSLLIDALKCGTIQTRSNAAAAIFTLSAIDSNKHIIGESGAIKHLLELLDEGQPLAMKDAASAIFNLCLVHENKGRTVRDGAVRVILNKMMDHILVDELLAILALLSSHPKAVEEMGDFDAVPLLLGVIRESTSERSKENCVAILYTICFSDRTKLKEIREEEKANGTLTKLGKCGTSRAKRKANGILERLNRSPSLTHTA

SEQ ID NO: 278697 - protein, 46 aa, Glycine max
  Clone ID: PAT_MRT3847_93686C.1.pep
FEPGLVEIDPPRGGILVDITGEWVTLIQNAPINNLVRVAAWKKGCL

SEQ ID NO: 278698 - protein, 54 aa, Glycine max
  Clone ID: PAT_MRT3847_93687C.1.pep
VYPHIYIAQPLQLPQTLVLLEHRKSQPSFQLMGTQISDQYLIYMSFMYTQSLHC

SEQ ID NO: 278699 - protein, 41 aa, Glycine max
  Clone ID: PAT_MRT3847_93688C.1.pep
QRIHKIFRLKEVTLPGGGKKNQNETPPLFGGVEGSIGGGTF

SEQ ID NO: 278700 - protein, 87 aa, Glycine max
  unsure (1)..(87): unsure at all Xaa locations
  Clone ID: PAT_MRT3847_93689C.1.pep
LCDNAGFDATDVLNKLRQKHASGEGANYGVDINTGGIADSFANFXWEPAVVKINAINAATEASCLILSVDETVXKNPKSESAQGEAA

SEQ ID NO: 278701 - protein, 118 aa, Glycine max
  Clone ID: PAT_MRT3847_9368C.1.pep
MDSNSSSPSPNNHASTTKINGFFHPKLGSQPATSSRSRLAMASPVNSDPKVVTGTAGYILEDVPHFTDYIPNLPTYPNPLQDNPAYSVVKQYFVHVDDSVPQKVVVHKDAHGRVHCIC

SEQ ID NO: 278702 - protein, 52 aa, Glycine max
  Clone ID: PAT_MRT3847_93690C.1.pep
TLITCLEMLLTHICNEKSCLCPSNQVLNFEVYIVECDKLHPGIISRHILYQL

SEQ ID NO: 278703 - protein, 44 aa, Glycine max
  Clone ID: PAT_MRT3847_93691C.1.pep
EKFKGVQEAVIQRSSLPKGAAEALTLSAASVSEEGSMASDLQGF

SEQ ID NO: 278704 - protein, 80 aa, Glycine max
  unsure (1)..(80): unsure at all Xaa locations
  Clone ID: PAT_MRT3847_93692C.1.pep
XQXLIEXHXXLXDXIXXILXLSXXNXXEIXXLGXLXAYLSXXPXYXXXXTKEXXPXQWXPFCLXXAXXXXRIXSLRTSXX

SEQ ID NO: 278705 - protein, 63 aa, Glycine max
  Clone ID: PAT_MRT3847_93693C.1.pep
GSRTASYMAYFVIIGIVKIKIVAECNPVVIVNLTIRGLLSIPQSFPSDGTIVPSSEAGPVPTI

SEQ ID NO: 278706 - protein, 48 aa, Glycine max
  Clone ID: PAT_MRT3847_93694C.1.pep
GFYAHDEQLVIGSVTVVPGFECVVHHLRACIHLLRLVNHVTGHSTSTL

SEQ ID NO: 278707 - protein, 42 aa, Glycine max
  Clone ID: PAT_MRT3847_93695C.1.pep
NIFSMFEHDIHVKFLCQNVFHKLMDQYIKGQLFTPHIALPAL

SEQ ID NO: 278708 - protein, 56 aa, Glycine max
  unsure (1)..(56): unsure at all Xaa locations
  Clone ID: PAT_MRT3847_93696C.1.pep
PXKPSCRYFTQYRPPHRLININLYNNFYFLIKKALKITNNNLVHFNITKSISPSFA

SEQ ID NO: 278709 - protein, 48 aa, Glycine max
  Clone ID: PAT_MRT3847_93697C.1.pep
SLIHVLPHYYPCYSIPASCKVSTFKPKKSHPLIPLTELTTSPDISESY

SEQ ID NO: 278710 - protein, 39 aa, Glycine max
  Clone ID: PAT_MRT3847_93698C.1.pep
VYVVYPGQVSCNCISMCVCGVCSPPKHALCRSCYVRLKH

SEQ ID NO: 278711 - protein, 98 aa, Glycine max
  Clone ID: PAT_MRT3847_93699C.1.pep
PPIFFIFFPKLYFPQAPALLQNYKKKCNPRSRLTLFARRGRKGRSNGGRVGNNYYLLQRARDEERRKETMDRERDKGEMGNQNYSKKFRFVETKILEP

SEQ ID NO: 278712 - protein, 163 aa, Glycine max
  Clone ID: PAT_MRT3847_9369C.1.pep
GTHLVLGVDFVSVHMYPDSWISQQIADTHIPFVKSWMEAHIEDAERYLGMPVVFAEFGVSSKDPGYNSSYRDTVISTVYSTILNSTKKGGSGAGSLLWQFFPDGTDNMDDGYAIVLSKSPSTSSIIQLQSTRLALFNSLCNTKCNWGCKKKKLLEEILYHDEL

SEQ ID NO: 278713 - protein, 83 aa, Glycine max
  Clone ID: PAT_MRT3847_936C.1.pep
KRKGLQIVVMSDEGLIAKSILWKHLEVLNLWNLMGVLWFHKGVSNCCESRKQICVNLEIGILECIAVFFLYKILEIVFDVQKC

SEQ ID NO: 278714 - protein, 34 aa, Glycine max
  Clone ID: PAT_MRT3847_93700C.1.pep
SPLPSYERAPGLICARRLILDRDHANHAAMTPGS

SEQ ID NO: 278715 - protein, 90 aa, Glycine max
  Clone ID: PAT_MRT3847_93701C.1.pep
FSFFCTHTNSPKTIGAYLQRLSLYSLQRYMTIQHTYIHRWSPPTTKVHLPPVIFVLSHNLNSLKAKCKAHTCNQQGHYPGYNTWGWGPPP

SEQ ID NO: 278716 - protein, 75 aa, Glycine max
  Clone ID: PAT_MRT3847_93702C.1.pep
YCKMSKYLYGGGICIGHNISKFIPLSHKRNHQTRCQYLSNTLGEDTHPNILLIKPPWALLSLFILLSIGGNSLML

SEQ ID NO: 278717 - protein, 80 aa, Glycine max
  Clone ID: PAT_MRT3847_93703C.1.pep
PCVQWVDDNLKQSKEDCFAHSMEYDIETNQVRALTVKTDPWCSCGGLTPDGTLVVAGGFADGGKTSRYYGGQPDCQDCDW

SEQ ID NO: 278718 - protein, 69 aa, Glycine max
  Clone ID: PAT_MRT3847_93704C.1.pep
PDERGFPPPLPGKGETNRIMGVGQPVPVAPPVILVFLQVILIVPVPPHLDFIQGPKGPDYALSDLRFLE

SEQ ID NO: 278719 - protein, 45 aa, Glycine max
  Clone ID: PAT_MRT3847_93705C.1.pep
LNQIWGDKPLNRNCRPSENSYVDRCSGYSFSDLYTTSNQHYGDLH

SEQ ID NO: 278720 - protein, 57 aa, Glycine max
  Clone ID: PAT_MRT3847_93706C.1.pep
DSKLDYDHRVKPKLRDVTHWVTKKRHVTQGIFPKLMHPRGNALSKRCKATYKPCRSM

SEQ ID NO: 278721 - protein, 135 aa, Glycine max
  unsure (1)..(135): unsure at all Xaa locations
  Clone ID: PAT_MRT3847_93707C.1.pep
PKFSHQRDLGWGEKPPWEGPGGEKGKQGPPPPGAQKKGPKPPPKKGLPGPGEKPPKRGFSAPXKRGLPFPKKRGELKKPPGGGGPPPKGPLKQPSRSGKTGTTGGKDRAKFNKEERVPGPLKHPRGDPKPGPKNP

SEQ ID NO: 278722 - protein, 75 aa, Glycine max
  Clone ID: PAT_MRT3847_93708C.1.pep
REASPRGYKQGKKGKGVDEVRRLWGFKKRNYALLAPDVIGSISVSTEDIALSGGNDRRRKLNWFVKTHTAVRLEQ

SEQ ID NO: 278723 - protein, 62 aa, Glycine max
  Clone ID: PAT_MRT3847_93709C.1.pep
TRPEDRESEIDEFLIGESVEEEVVEEPNWVLSTEELNKKFDDFIRKMKEDLRIEAQRQLLMV

SEQ ID NO: 278724 - protein, 120 aa, Glycine max
  Clone ID: PAT_MRT3847_9370C.1.pep
NPAVKRSDWASLVQVFLTTSSRAEHFDACKWPKSEPHSWELIFPIEVCGPNNGFQMWSSEWPNQTSWHLSFLNANPKQSTVFDVLLGISQDFEIAGNNLMPAFSVPQATARSFEKAESSA

SEQ ID NO: 278725 - protein, 99 aa, Glycine max
  Clone ID: PAT_MRT3847_93710C.1.pep
LGGGEKVFPGKKWGFAPFRDLCGKLGFKFGGGGPQGFGWGFAQKTRFPWGDKKAIVGSFFPRGLAPGPNHEGALFPFFFKGPLRGWEWFKLGFIKPFFP

SEQ ID NO: 278726 - protein, 59 aa, Glycine max
  Clone ID: PAT_MRT3847_93711C.1.pep
AGIFVKKKRLGAQLNKFHNLRGYCQYPVFYKPSDKILEFVTPKNKSPSTLLFPQKTKPE

SEQ ID NO: 278727 - protein, 181 aa, Glycine max
  Clone ID: PAT_MRT3847_93712C.1.pep
MNPKISAFGMARPFGWDQSQANPRKVVGTYGYMPPEYAVHGYYSVKSDVFGFGVIVLDIVSGNKNRGFSDPEHSVNLLGHAWRLWSEDRPLELIDINLSERCIPFEVLRCIHVGLLCVQQKPQDRPDMSSVIPMLNGEKLLPLPKAPGFYTGNCTPELVSSSKTCNPLSQNEISLTIFEAR

SEQ ID NO: 278728 - protein, 66 aa, Glycine max
  Clone ID: PAT_MRT3847_93713C.1.pep
LFPGLYLLKLWTLLNAWLRIQLRPRFTTDAIILRLIWPTILLSYHRQSKKDRGVFAIALSGGSLIR

SEQ ID NO: 278729 - protein, 65 aa, Glycine max
  Clone ID: PAT_MRT3847_93714C.1.pep
LKFRERYSRSKIIVFGFGLMPENHWFSSNNVLLEMMQQGLCNFFKKKKKKNIKNKKKVERRMGRF

SEQ ID NO: 278730 - protein, 51 aa, Glycine max
  Clone ID: PAT_MRT3847_93715C.1.pep
LFVHLVRASCFFHHLADGCCHVRQDSSVYLLVYKTVYSKMISNSAPFGRCS

SEQ ID NO: 278731 - protein, 424 aa, Glycine max
  Clone ID: PAT_MRT3847_93716C.1.pep
MPDHDMYHFDHMDEDDFFDEIDDQNHGRGVGDAALDEYEMLTKVTDTTAAQARKGKDIQGIPWESLNISRERYRLTRLEQYRNFENILTSGDAVDKECKQMEKGGNYYEFFYNTRMVKPTILHFQLRNLVWATSKHDVYLISNYSVNHWSSLSGNLSEIINFAGHVAPTPTKRYAGNLLEGFSQTQISTLAVKDNLLVAGGFQGELTCKRLNKKGVSFCTRTTHDDNAITNAIEIYGSLSGATHIIASNNDCGVREYDTNSFQPLNKYHTSISRPEAYDCVVYPQNGKTVANFVGHRDYSFASAWHPDGCTFATGNQDKTCRVWDVRHLSSPTAILKNNLGATRSIRFSSDGQYMVVAEPADFVHVYSTKADYRKRQEIDFFGEISGVSLSPDDECIYIGIWDRTYASLLQYNRKHQYKYLDAY

SEQ ID NO: 278732 - protein, 115 aa, Glycine max
  unsure (1)..(115): unsure at all Xaa locations
  Clone ID: PAT_MRT3847_93717C.1.pep
GSSLPLKGPVAKRRPGGTAKTLNINKIEKHHMVALKVCVALLSLVGFTSAHMELLFFKSDQSSSYDDDEYXKLCCDLCMCTLXTPPQCSXEDMRLNSRHSDCNSCMCTLSQXEQC

SEQ ID NO: 278733 - protein, 46 aa, Glycine max
  Clone ID: PAT_MRT3847_93718C.1.pep
FSASRSINALCHTFYILCNRSCKLMIKIMRLHACNFAKFIFLNISA

SEQ ID NO: 278734 - protein, 87 aa, Glycine max
  Clone ID: PAT_MRT3847_93719C.1.pep
KGKKKEKMGHHRPSTFLPPLFENLKSLKNLGGEGPEALVPYQKKYTPPNCSAGLCWMKKNLFNNNPFLTNPRGGEKIFVEPKGELLP

SEQ ID NO: 278735 - protein, 188 aa, Glycine max
  unsure (1)..(188): unsure at all Xaa locations
  Clone ID: PAT_MRT3847_9371C.1.pep
VILPSRASDFRTAMVSKNSKPQATAMHVGAIEIIIDSFASPDCNIYGAMLLVDTYHTNPENAVCSIFVAPFRGGRPIRVVTFPNTIVQIEPDMNSRFQLXLSTTTNGDFVKXKDTPMVKGNEACAAVGLTSKYTSTSLLESXEKDRGLIVEYFXRDVPVAHNVISPKKYLLEGNLLCFKSPLNGKVSL

SEQ ID NO: 278736 - protein, 44 aa, Glycine max
  unsure (1)..(44): unsure at all Xaa locations
  Clone ID: PAT_MRT3847_93720C.1.pep
MANGPGLYYDIGXIARDLLFKDYHSDQKFTMTTYXPTGVAITAS

SEQ ID NO: 278737 - protein, 56 aa, Glycine max
  Clone ID: PAT_MRT3847_93721C.1.pep
DSKTLMFVNISPDQSSAGESLCSLRFAAKVNACEIGIPRGQTQTSTRSSESRLSYG

SEQ ID NO: 278738 - protein, 348 aa, Glycine max
  unsure (1)..(348): unsure at all Xaa locations
  Clone ID: PAT_MRT3847_93722C.1.pep
MDIAALLTSAGINIAVCVVLFSFYSVLRKQPSNVNVYFGRRLASQHSRRIDLCLERFVPSPSWILKAWETSEDEILAIGGLDAVVFVRILVFSIRVFSIAAVICTILVLPVNYHGMDRMYKNIPLESLEVFTXENVKEGSKWLWAHCLALXYIITLSACALLYFEYKSITNLRLLHIIGSPPNPSHFTILVRSIPWSSEESYCETVKKFFSYYHASTYLSHQMVYKSGKVQKLKDDAEHMCKVIRDASMERTCKPSFMQCCCSGAPTISFKKISTEMGSTHGRTCNTDLHLDTGKKECSSAFGVFKRSVXALTAAQVLQTSNPXVWVTDVAPEPMMXXXSNICIPYRH

SEQ ID NO: 278739 - protein, 60 aa, Glycine max
  Clone ID: PAT_MRT3847_93723C.1.pep
AGSKVVLYILLWLNGSLSCHSEGFRHPIDTCGRVYRSETVSKSGSPSFFLCDVINSKKSM

SEQ ID NO: 278740 - protein, 51 aa, Glycine max
  Clone ID: PAT_MRT3847_93724C.1.pep
HKRTLDPLLRLQVMFIPQLSGYWGPLVSNKQCWQVLFCRFARLVAIKSVVI

SEQ ID NO: 278741 - protein, 192 aa, Glycine max
  Clone ID: PAT_MRT3847_93725C.1.pep
MEQTIWGHLPVLVRANSKESIEYILQALWRTRKTGLGTTDRCIIQEMLQLQNESDLDPLLVCLRMLIRRCVYENTSKEDIPKLFPSEVLPELQKLLTLLLHKFQREWQEDVMKDQNIVPRLKAMTWNMANLDKESADPAAVINLKLQNDGQFHSGEQDVKFKLATDSIDMMLKAMHCIRDQFSTVDEALNGH

SEQ ID NO: 278742 - protein, 113 aa, Glycine max
  Clone ID: PAT_MRT3847_93726C.1.pep
RLREDDRRGDMIDCTKMGMGGKAIPPNIDRVGDMQSDALFILLVEKDAAYMRLAEDRFYNRFPCIIVTAKGQPDVSTRLFLRKMKIELKLPVLALVDSDPYGLKILSVYGCGS

SEQ ID NO: 278743 - protein, 34 aa, Glycine max
  Clone ID: PAT_MRT3847_93727C.1.pep
LCMQIRVCVRCAPSIGALMLSDPYIALYGKPFNT

SEQ ID NO: 278744 - protein, 82 aa, Glycine max
  Clone ID: PAT_MRT3847_93728C.1.pep
HLFLRELFQALVKQLSQGRDNHPGNMSWNASGRPCTSCISVGCVKALDLIGFNDVHDSHDSLGVVNVMCVPLNSDAPTQHAS

SEQ ID NO: 278745 - protein, 77 aa, Glycine max
  Clone ID: PAT_MRT3847_93729C.1.pep
NYLPVPSPVVPVHIFFFLVSGRRHVSGPVDAVAVGVNPRVDDLVGRVQRVVVVFLHALFVWRRCLRVALDGTYSLES

SEQ ID NO: 278746 - protein, 95 aa, Glycine max
  Clone ID: PAT_MRT3847_9372C.1.pep
INKNNQRRTESQANNLILRPDYEKQTSLLYLLKPHIHKRACSRNRGPALASHSFMTSCMDTLLRVRVETCFRGLTRTLFIWLPGFSTFIGNAALR

SEQ ID NO: 278747 - protein, 83 aa, Glycine max
  unsure (1)..(83): unsure at all Xaa locations
  Clone ID: PAT_MRT3847_93730C.1.pep
SVIKMFVEFAFYFGKPFIRINVVVTVGSRPSLTRYLLFPRVVKCPFGACEPLSFSAEVLWFQCITPPSKFXLLWKKNFVKTSA

SEQ ID NO: 278748 - protein, 79 aa, Glycine max
  Clone ID: PAT_MRT3847_93731C.1.pep
RDNNHSKGLYLQGGGYIEDTASKTTETAHKGEFMPLYKWNLHGSQDWAQWDTRNSPAGLEDREQPDQLKHYEAPFKFAD

SEQ ID NO: 278749 - protein, 60 aa, Glycine max
  Clone ID: PAT_MRT3847_93732C.1.pep
LIWKASLIYRQLNFRIGFTSLWNLNCLLSLFLNWLLIILLFEIIKDFPFYSLESGWELGP

SEQ ID NO: 278750 - protein, 51 aa, Glycine max
  unsure (1)..(51): unsure at all Xaa locations
  Clone ID: PAT_MRT3847_93733C.1.pep
DLEKVLVRLXNGVLRIPVAKLGXDKKRRLKVFSIGXRDFLFKNVKVAKPNM

SEQ ID NO: 278751 - protein, 48 aa, Glycine max
  Clone ID: PAT_MRT3847_93734C.1.pep
RDDQTSEGKFLQKIMPPGFASFPGRNSEYTNPRFGFGLFVGDGFMKPA

SEQ ID NO: 278752 - protein, 153 aa, Glycine max
  Clone ID: PAT_MRT3847_93735C.1.pep
RSVEERIHDEAQCLIEELRTSKGALVDPTLLLHCITGNIICSIMFGKRFHYQDQEFLKTLNLFCQSFLLISSISSQLLELYCGFLKYFPGAHMLVYKNLQEINAYIGHSVEMHRETLDRSAPKDLIVTYLLHMEKEKSDPHSECSHHNLIINT

SEQ ID NO: 278753 - protein, 83 aa, Glycine max
  Clone ID: PAT_MRT3847_93736C.1.pep
EGLLWQGLFLTGVEFPSMMKNPHCLSVSILFIICLKRGFFHPWTQILVDHQSRTSDSMYYDGDRDLSSSVNDRPDDRLHRNGW

SEQ ID NO: 278754 - protein, 115 aa, Glycine max
  Clone ID: PAT_MRT3847_93737C.1.pep
LEEHSNLRRRKNVSKGDIANVPMESEPAAIWPGYLSASVLPFVLHLGFMVSTRFLSASPPLYWFASYIMANLYWFASYIMANPAKYFRWGYVIWAYSMAYIFLGSLLFSNFYPFT

SEQ ID NO: 278755 - protein, 65 aa, Glycine max
  Clone ID: PAT_MRT3847_93739C.1.pep
LYFICGLLGAFVFYSTFVLLLCVCLVPFAFRRGALLPVRLVGSGFRACFFLLLLLFPLCAFVRLC

SEQ ID NO: 278756 - protein, 138 aa, Glycine max
  unsure (1)..(138): unsure at all Xaa locations
  Clone ID: PAT_MRT3847_9373C.1.pep
LFVREVVGFLFAPFRGGRPIRVVTFPNTIGQIEPDMNSRFQLLSTTTNGDFVQGKDLTMVKANVACAAVGLTSSYTPTPLMESGLQKDRRLIVEYFGRMSYDDHNAXHPQEKDVMEGNLSYEIKSRCRLEKVSCTKAQ

SEQ ID NO: 278757 - protein, 74 aa, Glycine max
  Clone ID: PAT_MRT3847_93740C.1.pep
VLQNFGKVFWWRWNGDGQIRLGDVIYRNIPFEVTIEGRVPKKASWGWWHTLLLAESHTLCHGAPHPIMLVSGYI

SEQ ID NO: 278758 - protein, 111 aa, Glycine max
  Clone ID: PAT_MRT3847_93741C.1.pep
MEFMVRCCSSCALSRFRFSLRFAVVVFEIVLILAWLEVNNAKLQEHQFQWGGLEGRIENIASHSCIHDQILQQRKRPGHKVYSITPQVYEPGLSKPLQHIGGTLLGGSTSL

SEQ ID NO: 278759 - protein, 116 aa, Glycine max
  Clone ID: PAT_MRT3847_93742C.1.pep
VCSTPKNLHSAKLFRIRLLYRDVKCIGFRCSRPINISHADVGKVCTRLERSCAISFYHSITRYAAICECSGTRYHNALVYSLHHCRYHGRCSDASYVLCIQCSAIPFYTQWKTAFS

SEQ ID NO: 278760 - protein, 119 aa, Glycine max
  Clone ID: PAT_MRT3847_93743C.1.pep
MKDDKQAPVPASTTEGQPIRCKAAVSRRAGEPLVIEDIIVAPPKPREARIRIICSSLCHSDITLRNLQDPPAIFPRILGHEATGVVESVGKDVTEVTKGDVVIPVILPECGECIDCKST

SEQ ID NO: 278761 - protein, 156 aa, Glycine max
  unsure (1)..(156): unsure at all Xaa locations
  Clone ID: PAT_MRT3847_93744C.1.pep
MMKRLKVWAYKEGEQPLVHDGPVNNKYSIEGQFIDEMDMASMSPFKATHPEQAHLFLLPYSVSKVIRYVYKPRRSRSDYDPDRLQRLVADYINILANRYPYWNRSKGADHFLVSCHDWGPRISDANPELFKYFIXALCNANTSEGFQPNRDVSISE

SEQ ID NO: 278762 - protein, 48 aa, Glycine max
  Clone ID: PAT_MRT3847_93745C.1.pep
VKGWIYFSFSDATVASREILKNKELSLSLCLFSIDLGEDNITQKKKHA

SEQ ID NO: 278763 - protein, 52 aa, Glycine max
  Clone ID: PAT_MRT3847_93746C.1.pep
GFSCLNMYHMIPHMGSQCPRLLSRPRMFDADREGCLGLFPPIIFKQGHCWHH

SEQ ID NO: 278764 - protein, 226 aa, Glycine max
  Clone ID: PAT_MRT3847_93747C.1.pep
SSEFVLENWYYKILLLMTGQLENATIAVDALSVCMTINGWEMMIPLAFFAGTGVRVANELGAGNGKAAKFATQVSVAQSTIIGLIFCVLIMIFHEHIAYIFTTSTSVLQAVDNMSLLLAITILLNSVQPVLSGVAVGSGWQAYVAYINIGCYYLIGFPLGIIMGWVFKSGVIGIWGGMIFGGTAIQTLILIIVTIRCDWEKEEEKACFRVSKWSKSNSNGNLEASN

SEQ ID NO: 278765 - protein, 158 aa, Glycine max
  Clone ID: PAT_MRT3847_93748C.1.pep
PSLPREDINSTIKRTLLKSLESPDWNVRMESVDAVNKILEEANKRIQATGTGELFGALRGRLVDSNKSIVMASLTTIGNVASAMGQAVEKASKGILSDVLKCLGDNKKHMRECVLNTLDAWLAAVHLDKMVSYIAIALMDSKLGAEGRKDLFDWLSRQ

SEQ ID NO: 278766 - protein, 62 aa, Glycine max
  Clone ID: PAT_MRT3847_93749C.1.pep
KSLQSLSYAMIVIGLTEVYRTSGFSLAINVRIMSRCQPSPSRIQVGISKPFIFLFPCNQTPR

SEQ ID NO: 278767 - protein, 124 aa, Glycine max
  Clone ID: PAT_MRT3847_9374C.1.pep
CNATVNFLDEENPLYPPTVNNGDLHKFFVDVAGNLLGINKVDTNMEQDMAAEDFAFYQEFIPGYYFTLGMEIASSEPVAPLHSPYLVINEDGLPYGAALHASLATGYLYQQDVAKVVGKYHDQL

SEQ ID NO: 278768 - protein, 69 aa, Glycine max
  Clone ID: PAT_MRT3847_93750C.1.pep
YVLTYEDKDGDRMLAGDVPWDMLIETCKKLRIMLSSEAIGLAATAVRKKAEHDLGSSCVAVYASNCLRD

SEQ ID NO: 278769 - protein, 69 aa, Glycine max
  Clone ID: PAT_MRT3847_93751C.1.pep
NIFYVHPYMCFFFFSSCKYYILFVFSIYKLLFFAFTFLMEYGCFANVALHNILVDIILANVIICWHSNC

SEQ ID NO: 278770 - protein, 407 aa, Glycine max
  Clone ID: PAT_MRT3847_93752C.1.pep
MESYALHSLSTSFSRFSQLHHPPPPVISRSQFNQSQSLSLRSPITISQRFSFPSSTFKFNPFSKPHYPIQASPSSPPPPPPPTPIQGAKPIPFIISISIGLIVRFLVPKPVQVTPEAWQLLSIFLSTIAGLVLSPLPVGAWAFLGLTASVVTKTLTFTEAFGAFTNEVIWLIVISFFFARGFVKTGLGDRIATFFVKWMGKSTLGLSYGLTFSEVLIAPAMPITTASAGAAMIGLSILLLLGVLDWNDCLNEKSAWDTLAYIAIQVGMARQLTNLGIVSWMSDCVADNLRSFSLSWPASLAVLQAAYFFIHYLFASQTGHVGALYSAFLAMHRAAGVPGILAALALGYNTNLFGAITHYSSGQAAVYYGAGYVDLPDIFKMGFIMAFINAIIWGGVGSVWWKFLGLY

SEQ ID NO: 278771 - protein, 79 aa, Glycine max
  Clone ID: PAT_MRT3847_93753C.1.pep
GKRTPKGDISTLIDEGGTRCRHPDRSILRNHSSLANKNSHIATSQATAPGSLITAKAMAPCIHTTNNKGTSTIGIVFLI

SEQ ID NO: 278772 - protein, 280 aa, Glycine max
  unsure (1)..(280): unsure at all Xaa locations
  Clone ID: PAT_MRT3847_93754C.1.pep
SHAALVGFMAGAAIMIGLQQLKGLLGITHFTNKTDVISGSRSVYKSLHQQITSGEKWYPLNFVIGCSFLIFLLIARFVGRRNKKLFWLPAIAPLLSVILSTLIVYLSKADKNGVNIIKHVKGGLNPSSVQQLQFHGPQVGQAAKIGLISAVIALTEAIAVGRSFASIKGYHLDGNKEMLAMGCMNIAGSLSSCYVATGSFSRTAVNFSAGCQTSVSNIVMAVTVFLCLELFTRLLYYTPVAILASIILSALPGLIDISEACYIWKVDKFDFLACIGAFFX

SEQ ID NO: 278773 - protein, 109 aa, Glycine max
  Clone ID: PAT_MRT3847_93755C.1.pep
NGSIIKVADRRLNGAVDEEELTRALKVAFWCIQDEVSMRPTMGEVVRLLEDSIDINMPPMPQTVVELIEEGLDHVYKAMKREYNQSSSFTLTSHLTSQATCSNSTMSPR

SEQ ID NO: 278774 - protein, 175 aa, Glycine max
  Clone ID: PAT_MRT3847_93756C.1.pep
LHEGRTCTFVLSTENGVNGFTLDPSLGEFILTHPNIKIPSKGKIYSVNEGNARNWDEPTTKYVQMCKFPQDGSPPKSLRYIGSMVADIHRTLLYGGIFMYPADAKSPNGKLRLLYEVFPMSYLMEQAGGQAFTGKQRALDLIPKKIHERSPVFLGSYDDIEQMKELYAASKEDDA

SEQ ID NO: 278775 - protein, 97 aa, Glycine max
  Clone ID: PAT_MRT3847_93757C.1.pep
RYIESMVADIHRTWLNGGIFMYPADAKSPNGKLRLLYEVFPMSYLMEQAGGQAFTGKQRALDLIPKKIHERSPVFLGSYDDIEQMKELYAASKEDDA

SEQ ID NO: 278776 - protein, 325 aa, Glycine max
  unsure (1)..(325): unsure at all Xaa locations
  Clone ID: PAT_MRT3847_93758C.1.pep
CFSSAHSLPDSHAWSHSQPNDDDYVSFNDDASSSSFIPIIDLMDPNAMEQIGHACEKWGAFQLKNHGIPFCVIEDVEEEAKRLFALPTEQKLKALRSPGGATGYGRARISPFFPKFMWHEGFTIIGSPSHDAKKIWPNDHAGFCDLMENYEKQMKVLAERLTXMMFSLMDISEEKTKWVGASNISGAVQLNFYPSCPEPNRAMGLAPHTDTSLFTILHQSRITGLQIFKEGKEWVPVHPHPNTLVVHTGDLLHIISNARFRSALHRVTVNSTRERYSVAYFYSPPLDYVVSPLVDSVARFRDVTVKEYIGIKAKNFGEALSLIST

SEQ ID NO: 278777 - protein, 42 aa, Glycine max
  unsure (1)..(42): unsure at all Xaa locations
  Clone ID: PAT_MRT3847_93759C.1.pep
LPSHLEFFVSAFIAGHTLMPPNSQKNTASRTQLVLLVKLXLQ

SEQ ID NO: 278778 - protein, 95 aa, Glycine max
  Clone ID: PAT_MRT3847_9375C.1.pep
HTLHTSLRQLKEVWKFSNRQSILNKRVMPNFLIELTTNKRKKTNSRSCRGSAFSKICRACEQKSGIEITSNFKSERFPEKSKCRLFGLHSSRFEL

SEQ ID NO: 278779 - protein, 75 aa, Glycine max
  Clone ID: PAT_MRT3847_93760C.1.pep
YTLRRLGCIGASEVERQVVFKDINCDTLARPKAGFRPALESALHTLYLTSTYSWTAAEGIDYTSSDGADSRDAAR

SEQ ID NO: 278780 - protein, 103 aa, Glycine max
  Clone ID: PAT_MRT3847_93761C.1.pep
KKGQKTFFSNKNIPFRGFNPKATGAQKKKSLFFFFGFPSNRPPEKPLWETPGVFLQLNPTGGGGFLGFLGRPSYFPQSPSSWGPTLKKQFFPMPSRKGDLFFN

SEQ ID NO: 278781 - protein, 86 aa, Glycine max
  Clone ID: PAT_MRT3847_93762C.1.pep
GKNPPEGGEKKRGGYFFNPAPKKIQQFFSQSKNFFRTNPWGRKPLIFFPNPFFGAPPPGGPVGGIAIKPPPPGALFFWKKNGPRFF

SEQ ID NO: 278782 - protein, 51 aa, Glycine max
  Clone ID: PAT_MRT3847_93763C.1.pep
KIRNWNLGLVIFLRLDFEMLLVFISYFLHMVFYHMIWVVNMVSFISLPPVL

SEQ ID NO: 278783 - protein, 78 aa, Glycine max
  Clone ID: PAT_MRT3847_93764C.1.pep
SSSPESLSLSLSHLTPSSSSTSSSCSSPSAAAASSSPSSPFRLLLPKPPTAFSASSAAAASIYIYELHRFEEAAPATL

SEQ ID NO: 278784 - protein, 138 aa, Glycine max
  unsure (1)..(138): unsure at all Xaa locations
  Clone ID: PAT_MRT3847_93765C.1.pep
HEALIISSFKPFKADIAQYRXAFYTSILQKAPAAKDSFSFLPNXGAYPTNPRLTYHAASAICIXHDSSELLDTSXTAQADAPLCSCHAQKAAIDTQYRGVXEALLRALDAIFDDXDATSLXRAWEVAYDELAAAIKKA

SEQ ID NO: 278785 - protein, 93 aa, Glycine max
  unsure (1)..(93): unsure at all Xaa locations
  Clone ID: PAT_MRT3847_93766C.1.pep
EFSLRSCPPSLAXQGMRXSTIXDQRFLXLGFDXDXNEMXILXLXKLAKPLIGTARIVINSLHIKGDXLPTPILEAEALLYSXVSXPEVRIGMP

SEQ ID NO: 278786 - protein, 64 aa, Glycine max
  unsure (1)..(64): unsure at all Xaa locations
  Clone ID: PAT_MRT3847_93767C.1.pep
LPKKRALLLSSRLEPRFQNCLKYMKDQSIVKQNLFISIKNVSKVIVLFIGLTCRAGQSEXAYMS

SEQ ID NO: 278787 - protein, 116 aa, Glycine max
  unsure (1)..(116): unsure at all Xaa locations
  Clone ID: PAT_MRT3847_93768C.1.pep
HRNLPLKLKQWCNVVKXEYSNPTPFIRSSKYNWQVGHNAYATXMKQMHXVLQSLKIYRRIYEEYLAVPVIKGKKSELNKFSGVNNTTNVEAFNTNTGRGIQGPNSHCLAPNFAKMF

SEQ ID NO: 278788 - protein, 36 aa, Glycine max
  unsure (1)..(36): unsure at all Xaa locations
  Clone ID: PAT_MRT3847_93769C.1.pep
LFWVFYLGFLRLFCVMVSTARPRKGLSCSASVRPXL

SEQ ID NO: 278789 - protein, 83 aa, Glycine max
  unsure (1)..(83): unsure at all Xaa locations
  Clone ID: PAT_MRT3847_9376C.1.pep
IKNCCLSDPVVSRENYRSKHVHQRPSVFHITPLSSSIRISDKYTVKERREIEQSTHGVLYQIGEXGSANPRFHQLELEIKQRS

SEQ ID NO: 278790 - protein, 87 aa, Glycine max
  unsure (1)..(87): unsure at all Xaa locations
  Clone ID: PAT_MRT3847_93770C.1.pep
MRDVLRIASIPPTSLDGVTDWLDTADVDFYXSRLHLSCRRILWTITAGPDSAIGGGGCAWRTPGAAAPASCNSAAPAQGGGPSDVVP

SEQ ID NO: 278791 - protein, 86 aa, Glycine max
  Clone ID: PAT_MRT3847_93771C.1.pep
QGLQAFKEHFKNSKFPCEMEHYLPVVFSPPRDGKELTEPLPLVGNKQQQQQQAIPIPISSGGDGDVASSKSGGVGGDDETNEEEVA

SEQ ID NO: 278792 - protein, 71 aa, Glycine max
  unsure (1)..(71): unsure at all Xaa locations
  Clone ID: PAT_MRT3847_93772C.1.pep
MGEVITVWAGKKMAKKCMFAKKGEGPVVLFLHGFPELWYSWXNLILSCYEIXYRAVAPDIRDNGPTFYTAF

SEQ ID NO: 278793 - protein, 63 aa, Glycine max
  Clone ID: PAT_MRT3847_93773C.1.pep
ILPLPLFLSLILNTNKYTTTSNFDMQLAAELQRTHHRHQRQRQQQDTTPMCRQIQLTIFDHTV

SEQ ID NO: 278794 - protein, 37 aa, Glycine max
  Clone ID: PAT_MRT3847_93774C.1.pep
CLYIFFKENSRGERGKSQQTYSISLKTNTNTFPELHY

SEQ ID NO: 278795 - protein, 60 aa, Glycine max
  Clone ID: PAT_MRT3847_93775C.1.pep
QLQDLKNYFTIYQCPFLPKKVAHRVELQNLKQQPHFPYENFKTMILALSLNRRKTDFSVL

SEQ ID NO: 278796 - protein, 194 aa, Glycine max
  unsure (1)..(194): unsure at all Xaa locations
  Clone ID: PAT_MRT3847_93776C.1.pep
IAQHRLLDMPSLAFFTTYALLVLFWSDFYYSRISCXTDGLKLWXRPSFYTINAVVYVIXFTLWLIFLWKPISVSRIFFAGVSLFAALGFLLYGGRLFLMLQLSCVLIKGRRKKLQEVGKAAXYVTTICFSCFLIRCVMMCFNAFDKAADLDVLYHPILNFMYYLLVEILPSTLVLFILRKLPPKRGITQYHPIR

SEQ ID NO: 278797 - protein, 244 aa, Glycine max
  unsure (1)..(244): unsure at all Xaa locations
  Clone ID: PAT_MRT3847_93777C.1.pep
MEDSSLYTSTPSSQQQHLLNHPREGSETEQDGSKTKSHKKLALLPLVFLIYFEVAGGPYGEEPSVGAAGPLIAILGFVVFPFIWSIPEALLTAELATTFPGNGGFVIWANEAFGPFWGSLMGFWKFFSGVINLASYPVLCINYLKLVVPALSSGFPRSVSIFLSTCVLSFLNYSGLAIVGYTAVVLGVFSLLPFXLLSLFSLPKIDPNKWXSFGQEGVENDWTLYFNTIFWNLNFWDSASTLSW

SEQ ID NO: 278798 - protein, 82 aa, Glycine max
  Clone ID: PAT_MRT3847_93778C.1.pep
YTISTVLTGPYAHSLCIYEGRTVYHGTTSLINALPQQCQSPVAFRLGNHDRVPRFPYIHAGADTKSVGVARNMRSGTGTGTS

SEQ ID NO: 278799 - protein, 139 aa, Glycine max
  unsure (1)..(139): unsure at all Xaa locations
  Clone ID: PAT_MRT3847_93779C.1.pep
GGKSGNGFDSGLLKVAGKRKKKVKVKKKVSPAAKKVVKSELTVDGVGSRGGNDVESGEVCGEMDEVEEGELGTLXGELENGEFVPEKPVMLIRRSEIENGEIVSERWKKGEVERGEFVSGKWRKEEDVEKGEIVPEKGR

SEQ ID NO: 278800 - protein, 40 aa, Glycine max
  Clone ID: PAT_MRT3847_9377C.1.pep
VFNIFLGISRDFEMGGNTLMQAFFVPQASARFFENGESSA

SEQ ID NO: 278801 - protein, 248 aa, Glycine max
  unsure (1)..(248): unsure at all Xaa locations
  Clone ID: PAT_MRT3847_93780C.1.pep
QIPKQNPHHPPSFRNNPSRETLPRRPHRRLLRPACLRRRDSGDFHALRHVLNKRIQDGFLNTKITFNFLKDTNFSPSVIDNLVQTLSHLNQGATRRSALDSLVTRLCKLRRADEALRVIDSLARDNVCAPAACTFYPVLKCLTREEKSLDHARRVVDHMARLGIALDVTAHNIFLMAHCYAGELDAAAGVLKRMEEDGVGADPRTFDALVLGACRAGKVEGAMVWXERMWNDGVAMLYSTHMCIIGTL

SEQ ID NO: 278802 - protein, 37 aa, Glycine max
  Clone ID: PAT_MRT3847_93781C.1.pep
PEIGQVILLPGGHRKNVSPFLVQAGIVQKDHFKIHRF

SEQ ID NO: 278803 - protein, 160 aa, Glycine max
  Clone ID: PAT_MRT3847_93782C.1.pep
EVAKPGEVKQVKVLGVMALLDEGETDWKIIVIDVNDPLAPRLNDVEDVERHLPGLLRASGAWFRIYKIPDGKPENQFAFSGECKNKKYAMDIVRECAESWEKLITGKTQKGDINLTNTAVSHSNDRVEASTLNIPQGENKAPAPIDPSIDKWFYISGASA

SEQ ID NO: 278804 - protein, 37 aa, Glycine max
  Clone ID: PAT_MRT3847_93783C.1.pep
LNLLDIDHVNTKSLGRINLKCWTMNGAESIDVVKVTD

SEQ ID NO: 278805 - protein, 155 aa, Glycine max
  Clone ID: PAT_MRT3847_93784C.1.pep
CPRVRALAMVAAGSSGGENRAPATTSHLRRDTSLMERKQTKLTTFSSFQKPSEVPNKTSPLPKDKASAKAAALAAARDLERFAKIGSGRGLSACAMATSAQRRNASDMERVKRWNISEAMGVAWMECLHPHDTKAVYGKDFNAFSYKYIAVLVAS

SEQ ID NO: 278806 - protein, 54 aa, Glycine max
  Clone ID: PAT_MRT3847_93785C.1.pep
GFTRSIGIRVFFLSMAIPVYHYLVSFFLLPDWLEITSIVPCRSIAGNEHELRSL

SEQ ID NO: 278807 - protein, 73 aa, Glycine max
  Clone ID: PAT_MRT3847_93786C.1.pep
ILLNNRARKDADTTPRLFLELLLGLCLRESSYEAQKIEQVMSLHEKLFNGSRTMVFLVNLHMTYNQLLLTFFW

SEQ ID NO: 278808 - protein, 123 aa, Glycine max
  Clone ID: PAT_MRT3847_93787C.1.pep
RANSKEDHSCVLSRLFTLASKRIMKELKDLQKDPPTSCNACPDVAEYMFHWQGTSMGSPHSPYAGGVLLETINAPPDYPFTPPNVAFRTKVFPPHINNMDCISLETLNEQRSPPLTISKAMLS

SEQ ID NO: 278809 - protein, 44 aa, Glycine max
  Clone ID: PAT_MRT3847_93788C.1.pep
LFMDLLFHDNHLWSKSTMRVVFLARGDGLFHCPRRKPSICSRAG

SEQ ID NO: 278810 - protein, 66 aa, Glycine max
  Clone ID: PAT_MRT3847_93789C.1.pep
PPPGFLLFPMRALDTPGLDVPQAVITCFKGFPLNVFKPHQSKKGPDVPPDQIKPVLLDSPGSPGIM

SEQ ID NO: 278811 - protein, 66 aa, Glycine max
  Clone ID: PAT_MRT3847_9378C.1.pep
SQESSNCFLLLGVRFLKGKKITLCAGHRLRESLSFPLLEYLLNTLLFDIGLRVRSKLKLTLSQFSA

SEQ ID NO: 278812 - protein, 39 aa, Glycine max
  Clone ID: PAT_MRT3847_93790C.1.pep
LLKIGFLSFVGKDFLQLIIRMLNNTFQILVFKIYFKSLA

SEQ ID NO: 278813 - protein, 55 aa, Glycine max
  Clone ID: PAT_MRT3847_93791C.1.pep
IWLLCLCQDDDGYSIKIFASNVFVGIRSCAPLSFNSKKIIGLPIYVCCIELVPMM

SEQ ID NO: 278814 - protein, 47 aa, Glycine max
  Clone ID: PAT_MRT3847_93792C.1.pep
LKLVVQFSSCQLLSVLVDNYHFCVSFVKYISCIKMVKMAIWAYMLRY

SEQ ID NO: 278815 - protein, 57 aa, Glycine max
  Clone ID: PAT_MRT3847_93793C.1.pep
EYEFLIIIFIINISTTLCLFPTVNLLRYALNQLIRVYEGKVEKGWITPCLSCTTILI

SEQ ID NO: 278816 - protein, 42 aa, Glycine max
  Clone ID: PAT_MRT3847_93794C.1.pep
LELELLPHLICRNWLVIHIWFFFLSYIDVYCLRLSMVEIDYL

SEQ ID NO: 278817 - protein, 112 aa, Glycine max
  Clone ID: PAT_MRT3847_93795C.1.pep
QVRNFNTPENLNPPKNRTKPLQKHHTLTRSLTPSSLCMTLFQPASSATPLAVLMAVQLLAVSDDPHPSQLTPPHQPKLPTFFSRHKNTTTLNAKTATLDLTTQQQNQQLAIE

SEQ ID NO: 278818 - protein, 63 aa, Glycine max
  Clone ID: PAT_MRT3847_93796C.1.pep
VNESLHVSEIRTDLYQTGRVGRLILIVEITTREFYALPKNLSTFYWTTIIKPDYAPTQVGGTY

SEQ ID NO: 278819 - protein, 123 aa, Glycine max
  Clone ID: PAT_MRT3847_93797C.1.pep
QALVRGYLVRKQAAATLHSMQALIRAQATVRSKKSHGLSSTKNEAHLFQTQARRSMERFDDIKSEYIAPIHSRRLSSSFDATMNNANSVDGSPKIVEVDTGSGRPKSRSRRSNTSMSDFGDDP

SEQ ID NO: 278820 - protein, 187 aa, Glycine max
  Clone ID: PAT_MRT3847_93798C.1.pep
DELMLAKQTGLSRNQVSNWFINARVRLWKPMVEEIHMLESQQGQKRSHWEERSKKNLSDHLPSDHNSVVFENPSTSMEKFHDAPYKHPRNELANKQVRSQEQLNQTNTGNQQVMGVGVSNNGVSLTLGLHQNHHGIGLFEPFGMSAAQRFGVALQPEGYVLSSFESQNRHFGKDVIGGGQLLHDFAC

SEQ ID NO: 278821 - protein, 41 aa, Glycine max
  Clone ID: PAT_MRT3847_93799C.1.pep
CILGLSAGDLTSVFDVVSIMGSERIVIGVLVIGCYGCLRRC

SEQ ID NO: 278822 - protein, 169 aa, Glycine max
  unsure (1)..(169): unsure at all Xaa locations
  Clone ID: PAT_MRT3847_9379C.1.pep
ECVPRTYCVLNPHSXEEINRWMGKLTFSQGTSRXLKRLPLSIGGGAGAKNAILMTTPNAVLSMWRYFVGDLVFEVFKMTSPYIKCTASFFIAFGNLVDDTINFEAFPHKLVQFGEIQEKVVLXSSQEEIFTAWSTQVRPTTTLVADGXTXLDAMGHDRSMSTIPSDFVH

SEQ ID NO: 278823 - protein, 82 aa, Glycine max
  Clone ID: PAT_MRT3847_937C.1.pep
AVQVILNDGNSQFSGNGNPIYQVMGTSTFNQYTAVHDVSVPNIDPKAPLEKVALLGCGTSTDLGAVSNTAKVESGSIVAIFG

SEQ ID NO: 278824 - protein, 47 aa, Glycine max
  unsure (1)..(47): unsure at all Xaa locations
  Clone ID: PAT_MRT3847_93800C.1.pep
IFTFSGFALMCNVCLARPYYSKECFXFQSTFEWAFALAFQIEKQRNI

SEQ ID NO: 278825 - protein, 111 aa, Glycine max
  Clone ID: PAT_MRT3847_93801C.1.pep
IPPSCFLPPRQCMFSVKEMAPGAPCFFSLTPGFFVGSRSLFLASFFFLSSSASPLAFFGASCGPLFLLYYCVFISSLPLKQSLCRFPSFAVKVTCHIFCPIPSLCALFVFY

SEQ ID NO: 278826 - protein, 57 aa, Glycine max
  Clone ID: PAT_MRT3847_93802C.1.pep
THFRVNSYSLTTNSLPGLHSHLLHLGFTPTTLNPVPNLLDKTPALIHKIFYTPLRDH

SEQ ID NO: 278827 - protein, 650 aa, Glycine max
  unsure (1)..(650): unsure at all Xaa locations
  Clone ID: PAT_MRT3847_93803C.1.pep
MTSGSCIGISTMKPCCRILCNYKSPLFLGFLQPSSVFSNHGHVVIRLSQLNPFIPVILRFINVIHPNWRDFIGSNWGLAVTPRILALGHNIGSFWPRVVSLTPHVASDFXNHSTSVDSHSNDTSFEKIYIQSGLNVKPLIIERIETDQSKLEEVAEERCNESNVNIDNLKDLSENKVQREVSEIEKEAEVASDAXVTYCGNPVGTVAANDPADKQPLNYDQVFIRDFVPSALAFLLNGEGEIVKNFLLHTLQLQSWEKTVDCYSPGQGLMPASFKVRTVPLDGSNEAFEEVLDPDFGESAIGRVAPVDSGLWWIILLRAYGKLTGDYALQERVDVQTGIRLILKLCLTDGFDMFPSLLVTDGSCMIDRRMGIHGHPLEIQALFYSALRCSREMLIVNDATKSLVAAVSNRLSALCFHMREYYWVDMKKINEIYRYKTEEYSTDAVNKFNIYPEQIPSWLVDWISEEGGYFIGNLQPAHMDFRFFSLGNLWAIVSSLGTTRQNQGILNLIEAKWDDIVGQMPLKICYPALEGEEWRITTGCDPKNTPWSYHNGGSWPTLLWQFTLACIKMGRPDLAQKAVDSAEKRLSADRWPEYYDTPNGRFIGKQSRMVQTWTIAGFLTSKMLLENRTRGFSLSRATDRSLHRNHLLKL

SEQ ID NO: 278828 - protein, 79 aa, Glycine max
  Clone ID: PAT_MRT3847_93804C.1.pep
FFLKNCIKKTSKKKVIKKKKTKEKKKKKKKNNQKKKKKKEKKKKKKKKKKKKGKKKKTRRKNKTSLKKKKQKKKKRKAN

SEQ ID NO: 278829 - protein, 61 aa, Glycine max
  Clone ID: PAT_MRT3847_93805C.1.pep
LTQRRGTVLGVQPLYGEGDVLYILHMPTAGGPQTLHSIGCGQDRCPHCIKIFLIHPSLFAP

SEQ ID NO: 278830 - protein, 60 aa, Glycine max
  Clone ID: PAT_MRT3847_93806C.1.pep
ATSILEAKLSGVVYIGALWTIFYYAKIVVLLGFTLLYSPIQSMGHVKVYSTPLSYMYNIG

SEQ ID NO: 278831 - protein, 50 aa, Glycine max
  Clone ID: PAT_MRT3847_93807C.1.pep
EFVKSLDNRGQCLISSFIAHQSYSFVFELKCLSITLTNLNLCIHSNIICL

SEQ ID NO: 278832 - protein, 185 aa, Glycine max
  Clone ID: PAT_MRT3847_93808C.1.pep
MSDEVNSVFKKYLNQLQLHPLRTKAITAAFLAGFSDAVAQKLSGAKKLQLRRVLLFMLYGFAYSGPFGHFLHKLMDKIFKGEKGNDTVAKKVILEQITSSPWNNFLFMMYYGLVIEGRPWSTVINKVKKDYPSVQLTAWKFWPIVGWVNYQYMPLQLRVVFHSSVAACWAIFLNLKARSVAIKAA

SEQ ID NO: 278833 - protein, 76 aa, Glycine max
  unsure (1)..(76): unsure at all Xaa locations
  Clone ID: PAT_MRT3847_93809C.1.pep
VSMLRSPKRPSLTPRALHNGRVSYRXPNDRLFVKAFTKEIGLDQHSRSAMQAGIDXIANAFALTLGPRRRNVVADE

SEQ ID NO: 278834 - protein, 70 aa, Glycine max
  Clone ID: PAT_MRT3847_9380C.1.pep
YPPYTSVLVLSKLKSDLGDFYFNFMHISKVILVKGNDSALSIDLVTVILATEKRGKIPMEQDTVVELFSS

SEQ ID NO: 278835 - protein, 146 aa, Glycine max
  unsure (1)..(146): unsure at all Xaa locations
  Clone ID: PAT_MRT3847_93810C.1.pep
APCGCPSGKSGSTHHALTGVRRQQKGALNIATTRLILPTHFPTSSFKTQILQMTTTGKTINLEVESSDTXIDNVKAMLQHKDRMPADQPHLIFDXKQDQDCRPLSXLHQQKETTLHHGLRLRGGMQMLPKTVTGRTITLHVESSYT

SEQ ID NO: 278836 - protein, 79 aa, Glycine max
  unsure (1)..(79): unsure at all Xaa locations
  Clone ID: PAT_MRT3847_93811C.1.pep
MSDHVGPPIYEYNDEVIIDEFFLDESDILHELSMDDEDLPDADDDFETKHVEEVDDAIDTFKSHXGELYACACSTTDVT

SEQ ID NO: 278837 - protein, 214 aa, Glycine max
  Clone ID: PAT_MRT3847_93812C.1.pep
MKFMYLAFLLLFVFSSQFLLGGADASPRQVIDTEGKKVRAGVDYYIRPVPTTPCDGRGPCVVGSGYVLIARSSNHTCPLSVAVVEGFRGLAVTFKLVNPKKGVIRVSTDLNIKTSLTNTSCSESTVWKLDAFDDSTGQWFVTTGGVLGNPGKDTIDNWFKIEEYDDDYKLVFCPTVCNFCKPLCRNVGVFRDSNGNQRVALTDEPYKVRFQPSA

SEQ ID NO: 278838 - protein, 59 aa, Glycine max
  Clone ID: PAT_MRT3847_93813C.1.pep
MSTGKDISLKSSDSDAFEVDEAVALEAQTIKHMIEDDCADSGIPLPNVTSKILAKVMRV

SEQ ID NO: 278839 - protein, 64 aa, Glycine max
  Clone ID: PAT_MRT3847_93814C.1.pep
EPTRWAKAKAMKTLTDHRLGKTEASATTKGTTPAAKSNTRTAQAKCLKRWHLQRKGEDHFALTE

SEQ ID NO: 278840 - protein, 44 aa, Glycine max
  Clone ID: PAT_MRT3847_93815C.1.pep
GCFASIQELVFVILITEHWFREYNQRMYVIPSIKKKTIFLAFLK

SEQ ID NO: 278841 - protein, 49 aa, Glycine max
  Clone ID: PAT_MRT3847_93816C.1.pep
RLREDDRRGRERVRCSYRRYRWRKSWRSHLTHHTARDTAIESWFVCRRR

SEQ ID NO: 278842 - protein, 60 aa, Glycine max
  Clone ID: PAT_MRT3847_93817C.1.pep
DFPGISFDCKDVFPFPCQCGDCFACGIKMLSNYDYFLLTKEILLFMPVQNSPVLALSREA

SEQ ID NO: 278843 - protein, 58 aa, Glycine max
  Clone ID: PAT_MRT3847_93818C.1.pep
LVREIPITMKICGLISVLTIIFKVHCGRTMLMYHNVIGLSYRLADQSGMEIWGTGILF

SEQ ID NO: 278844 - protein, 128 aa, Glycine max
  unsure (1)..(128): unsure at all Xaa locations
  Clone ID: PAT_MRT3847_93819C.1.pep
LKSFLASHNIIIADGIDKTRATFQFRKLANCDFINSNFKQMFNALCVAPEDQASLWSQHHYVASNNLEMQESYIVNLVNVLLELYLPHPEEARQLRKXALFLIQWLHIADVPTITPIVEFHSMQRMMN

SEQ ID NO: 278845 - protein, 172 aa, Glycine max
  unsure (1)..(172): unsure at all Xaa locations
  Clone ID: PAT_MRT3847_9381C.1.pep
VKHVAHESLKDQISADGMMFSTKGDTMAHIMNLRQSAVGDLKLLTDGKLYEGKHIPVSNITAGEKYVVQIPIMAHEEMQSSSASEFRTAMVSXNSKPQTTAMHVGTIEIIIDSYASPDXNILXAMLLVDTYHTNPGNAAKYIYDAPFIGGRPIRVVTFSXSIAHIEPDMNSK

SEQ ID NO: 278846 - protein, 68 aa, Glycine max
  Clone ID: PAT_MRT3847_93820C.1.pep
PDDDSEVGRALANSCRSVSGVLVDAHIGDKLSEELFLRVERRATSHGKELLEQLQFFHIVASLSFALL

SEQ ID NO: 278847 - protein, 109 aa, Glycine max
  Clone ID: PAT_MRT3847_93821C.1.pep
MATVSSLCAVFPILTPTLSKPRLAPLSCRIPKRRRISIITSVAEDREIVPVSEGRGTRLNEVEGFQPSEPHTESEVVVSSLTSSSSVNAIIVLGFGTFAVTKLLTIDHD

SEQ ID NO: 278848 - protein, 141 aa, Glycine max
  Clone ID: PAT_MRT3847_93822C.1.pep
RAYIESDGGFSTSRHYLFTPFSATSTLIGRIQPLDSPCVLWTFPCSHFVSLRRSLSLHSPSHCFRRNRSRISKPRRKPKQGGLWRRRKRPTNIQAGGEKGTSAATHMESEKGNCDVYRTRNGGLDLGPVMSSIVLEVLAEK

SEQ ID NO: 278849 - protein, 73 aa, Glycine max
  Clone ID: PAT_MRT3847_93823C.1.pep
ENGARYTTFTFIVYTIEHLSYHEQLYILTLGENWPLFPLKKKKKKKKKKKKKKKKRKNKKKRTRLTYACKQKI

SEQ ID NO: 278850 - protein, 167 aa, Glycine max
  Clone ID: PAT_MRT3847_93824C.1.pep
KEFMAGILHHLPSILAFIAPLPNSYDRLQPNTWSGAYLFWGNENKEAPLRATSPPGTPDGLVSNFEMKSFDGSANPYLGLAAILAAGIDGLRRKLSLPEPVDTNPNPETLQRLPASLSESLDALNKDDFLKEFMSDKLLTTIKAIRKAEIDHYTKHKDAYKQLIHRY

SEQ ID NO: 278851 - protein, 74 aa, Glycine max
  Clone ID: PAT_MRT3847_93825C.1.pep
NPSEKPKLTNTVAFFFFQTHLKLAWGVEVPVFCFIKEPDHVVVFSNGISNDSGLEAGRDHNIFPESFEQIIGTP

SEQ ID NO: 278852 - protein, 114 aa, Glycine max
  unsure (1)..(114): unsure at all Xaa locations
  Clone ID: PAT_MRT3847_93826C.1.pep
DKQEQYTVEGVQNLGGKAVMCHRLNFRTAVFYCHVVHGTTAFIVPMVAGDGTKTRTLXVCHSDTSTMNQXMLRETMGVDPEINPVCHFLGSKAILWVPNLAVDRXTAYQTDVVV

SEQ ID NO: 278853 - protein, 120 aa, Glycine max
  Clone ID: PAT_MRT3847_93827C.1.pep
QSNESLRRQAAAVAFEQKVHPEKIESDHSAASLEQKVQPEKIEPGHSATALEQKVNPEKIEPVHSSTALEQKVHPEKIEPDHSAAALEQKVHPEKIEPDHEVAVAEKMHVQPRIIADNMT

SEQ ID NO: 278854 - protein, 61 aa, Glycine max
  Clone ID: PAT_MRT3847_93828C.1.pep
MIIVMMMKVLVFFVAIISAAWHCYAYDMFTLRMNTGYGARIPVVKFARWWLAVVAHIIFGF

SEQ ID NO: 278855 - protein, 53 aa, Glycine max
  unsure (1)..(53): unsure at all Xaa locations
  Clone ID: PAT_MRT3847_93829C.1.pep
LAENNILTDHWXTRALHSLKSRKFTFCRLGNVPETGILTVYRTVIQKAGALKM

SEQ ID NO: 278856 - protein, 160 aa, Glycine max
  Clone ID: PAT_MRT3847_9382C.1.pep
MATVKLYSSDKKEFVVPVEVASQSVTIKNMLEDLGSDNDAPIPLPNVSAKILEKVITYCKYHHEHPTPQSEEKKDEKRTDDIIPWDREFCQVDQATLFELILAANFLDIKPLLDLTCKTVANMIKGKTPEEIRKTFNIKNDFTPEEEEQVRKENEWCEER

SEQ ID NO: 278857 - protein, 63 aa, Glycine max
  Clone ID: PAT_MRT3847_93830C.1.pep
KGWAFGSINPSKPPPVWGEGGINPLCFLIFPCPPSWLICFFIFFFNKICPPRLHFGLRAFSWG

SEQ ID NO: 278858 - protein, 288 aa, Glycine max
  Clone ID: PAT_MRT3847_93831C.1.pep
MTDSTQAKLKTQNVVVSLSLTLTLVLVLLTSKANSAETVSFSWNKFVPKQPNMILQGDAIVTSSGKLQLNKVDENGTPKPSSLGRALYSTPIHIWDKETGSVASFAASFNFTFYAPDTKRLADGLAFFLAPIDTKPQTHAGYLGLFNENESGDQVVAVEFDTFRNSWDPPNPHIGINVNSIRSIKTTSWDLANNKVAKVLITYDASTSLLVASLVYPSQRTSNILSDVVDLKTSLPEWVRIGFSAATGLDIPGESHDVLSWSFASNLPHASSNIDPLDLTSFVLHEAI

SEQ ID NO: 278859 - protein, 79 aa, Glycine max
  unsure (1)..(79): unsure at all Xaa locations
  Clone ID: PAT_MRT3847_93832C.1.pep
KKKRGGGENICCWSSKKYFSPPGRRKKKKNFFCGGAFFPLESPLFPLGSINQXTLEGKKLEIIWTFVFFTIKKVCLVAE

SEQ ID NO: 278860 - protein, 164 aa, Glycine max
  Clone ID: PAT_MRT3847_93833C.1.pep
GVASAGYSFNVLMNSYCQMNRAVDASKILCRLVNEKQLKPWHSTYKLLVTKLLVQGGFTDALNILGLMRTHGFPPFTDPFIEHLSKSGSGDDAVLFLKAMTSKRFPSTSMFLRMFEAFFKHRRHEEAQNFLSKCPRYIRNHADVLNLFCSLNSKEAASSSMLAA

SEQ ID NO: 278861 - protein, 62 aa, Glycine max
  Clone ID: PAT_MRT3847_93834C.1.pep
MGPVHSRGNGISSSALPYKRTPPSWLKISAQDVDDHICKFANTSLSPSQIAVILTDSHRIAQ

SEQ ID NO: 278862 - protein, 85 aa, Glycine max
  Clone ID: PAT_MRT3847_93835C.1.pep
PVVALMACSPAESVDRKKTPARWARRMHGGGLNTVAFSEEVCDDVRALLRRYREGWAMTQCSDAGIFLTWKEQPVVWASAWRALT

SEQ ID NO: 278863 - protein, 310 aa, Glycine max
  unsure (1)..(310): unsure at all Xaa locations
  Clone ID: PAT_MRT3847_93836C.1.pep
TSLTSPCCRSINYVICALGEIYSDGYFFRWVNQPLDSETVLNKLNGLILDEFVAEKYTAPRLVLAASGVEHEELLSVAEPLLSDLPSVPRLEGPKSVYTGCAYRXQSESGRTHFALAFELPGGWHKLKDAMILTVLQMLLGGGGSFSAGGPGKGMYSRLYLNVLNEYPQVHSISAFNNIYNGTGIFGIQVTTGSDFVSKAIDIAANEILAVATPGQVDQVQLDRAKQATKSAILMNLESRMVVSEDIGRQILTYGERKPVEDFLKAVDEVTSKDITSISRKLICSPLTMASYGDVLYVPSYESVSLKFRA

SEQ ID NO: 278864 - protein, 199 aa, Glycine max
  unsure (1)..(199): unsure at all Xaa locations
  Clone ID: PAT_MRT3847_93837C.1.pep
MKVLVFFGATIVVAWQCHAYDMFPLRMNTGYGARTPEVKCASWRLAGEAHNIFGFETIPXRIHSKPPQKYIRSEQFXSHSMTVNXQSYFDTTNLEIHPKDTFVFNIYNTILSNIPYYKKHDIXVNKFNSTFYNKXLNINNSPALPDTLKNYNKLISLNFNIIFLSETTLDKQTSTXSNLKKAIYPTXLRLMLQDPHDRS

SEQ ID NO: 278865 - protein, 55 aa, Glycine max
  Clone ID: PAT_MRT3847_93838C.1.pep
LEFLVTFLLYIVLQLFDPRAQFWRFQLKVTWEPSILLEVAWTVDSVSPTFKGYDL

SEQ ID NO: 278866 - protein, 212 aa, Glycine max
  unsure (1)..(212): unsure at all Xaa locations
  Clone ID: PAT_MRT3847_93839C.1.pep
MYRNAASRLRVISARSCSSSRIPASARFASSVATQQSSSGLGGLFGWLTGDRSSSLPSLDFPLPGVTLPPSLPDFVAPGKTIITTLPNGLKVASETSPTPTASVGLYVDCGSIYETPISFGATHLLERMAFKTTRNRSHFRVVREVEAIGGNVQASASREQMGYTFDALKTYVPEMVELLVDCVRNPVFLDWEVNEQLLKVKAEIXEASKNP

SEQ ID NO: 278867 - protein, 105 aa, Glycine max
  unsure (1)..(105): unsure at all Xaa locations
  Clone ID: PAT_MRT3847_9383C.1.pep
GPQHPSVVQKLAKQSYLVSRLSPNFNCKNYSTTNSYVNDGMHSPELTIISPVSPVTRHAPAEKRVIEFLXNCLINKVSTTISKTATTPIKRVKLLIQNQNEMIKS

SEQ ID NO: 278868 - protein, 297 aa, Glycine max
  Clone ID: PAT_MRT3847_93840C.1.pep
ARVLLEAIHSAGFSGALANPLLASESALNRLNGTILEEFVAENYTAPRIVLAASGVEHEELLSVAEPLLSDLPSVPRLEEPKSVYTGGDYRCQSESGRTHFALAFELPGGWHKLKDAMILTVLQMLLGGGGSFSAGGPGKGMYSRLYLNVLNEYPQVHSISAFNNIYNGTGIFGIQVTTGSDFVSKAIDIAANEILGVATPGQVDQAQLNRAKQATKSAILMNLESRMVVSEDIGRQILTYGERKPVEDFLKAVDEVTSKDITSISQKLISSPLTMASYGDVLYVPSYESVSLKFRS

SEQ ID NO: 278869 - protein, 207 aa, Glycine max
  Clone ID: PAT_MRT3847_93841C.1.pep
MILSKRNVFGTKGKMGIDFMILVLTLSWFCLTTICVSATKQAYPPTPQPNQNLRFDQNGEFKILQVADMHYANGKTTHCLNVLPSQNFSCSDLNTTIFLNRMIKAEKPNLIVFTGDNIFGFDSSDSAKSLDAAFAPAIASNIPWVAVLGNHDQEGTLSRSGVMNHIVGMKNTLSKFNPPEVHSIDGFGNYNLEVWRVESTDFENNQC

SEQ ID NO: 278870 - protein, 425 aa, Glycine max
  unsure (1)..(425): unsure at all Xaa locations
  Clone ID: PAT_MRT3847_93842C.1.pep
MILSKRNVFGTKGKMGIDFMILVLTLSWFCLTTICVSATKQVYPPTPQPNQNLRFDQNGEFKILQVADMHYANGKTTHCLNVLPSQNFSCLEPNRLEGDVKSIKTWKRLDDQHLTGIDGEVLWSKSTVFLNRMIKAEKPNLIVFTGDNIFGFDSSDSAKSLDAAFAPAIASNIPWVAVLGNHDQEGTLSRAGVMNHIVGMKNTLSKFNPPEVHIIDGFGNYNLDVGGVQGTDFENKSVLNLYFLDSGDYSQVSTIFGYDWIKPSQQLWFQRTSAELKKAYISKPVPQKDAAPGLAYFHIPLPEYASFDSSNMTGVKQEPDGNGLSSPSVNSGFFTTLLAARDVKAVFTGHDHINDFCGNLMNIQLCYGRGFGYHAYGKAWXPIRAIVVVASLEKTLKVSWGDVKSIITWNYFDDQNLTGKQDDGS

SEQ ID NO: 278871 - protein, 130 aa, Glycine max
  Clone ID: PAT_MRT3847_93843C.1.pep
MHDPTKLFECFTHTSTPHCTYRGTATRLISNLDGLLGVHEQGLYIATHGLGTYLMNPLIGPLSPWGEPEPDPCDFPLLPTKGCDEDTPYTRRRPEDKHWPPITKARCISGCTTVDSAAEDPVVWPMSLWY

SEQ ID NO: 278872 - protein, 57 aa, Glycine max
  Clone ID: PAT_MRT3847_93844C.1.pep
PLFDKNISDYIYLPFISIYFVLDFDTNEHSSSSIAIPALALYARRVERCRSSRFWSE

SEQ ID NO: 278873 - protein, 75 aa, Glycine max
  Clone ID: PAT_MRT3847_93845C.1.pep
TIKFVINYPQQRKIKMTPLKTGLVFGFGAMFGILMSLGAQCHKTGHHHPWSCHTKARTKEIAEGAAKVYATIANN

SEQ ID NO: 278874 - protein, 38 aa, Glycine max
  Clone ID: PAT_MRT3847_93846C.1.pep
DQLLVMRPELYDRLGIIKKKQLYDGNGSKVYGAGENRQ

SEQ ID NO: 278875 - protein, 74 aa, Glycine max
  Clone ID: PAT_MRT3847_93847C.1.pep
CSANKLRCGKCKHSRSLCPAQRVCVVPLRNQTPMSSNKLKCSYLRESIVFAQGSRGRQIVLAVHPYAKSPECMA

SEQ ID NO: 278876 - protein, 70 aa, Glycine max
  Clone ID: PAT_MRT3847_93848C.1.pep
QPNFEKKLNWLMFFGKGNKKICCITFAFNPRHKIPALFSFAGGIKGLIPKMVPRSKPSFNGLGRFFGTAP

SEQ ID NO: 278877 - protein, 85 aa, Glycine max
  Clone ID: PAT_MRT3847_93849C.1.pep
VPSRPIPVNTWSSGSERFRAAIVHSALVVPGFSGQVCESLLNGPRYLDDQAIPNAMRSTLAVGACWSTFAGPGLRTNSFQCFRAV

SEQ ID NO: 278878 - protein, 116 aa, Glycine max
  Clone ID: PAT_MRT3847_9384C.1.pep
MAQEERLTSSAREVRTARVSKKSKPQATAMHVGAIESIIDRFASPDCNIVGAMLVVDTYHTNPENAVRSIFDAPLRGGRPIRVGTLPNTIVQIEPDMNSRFQPLRTTTNGDSGQGK

SEQ ID NO: 278879 - protein, 224 aa, Glycine max
  Clone ID: PAT_MRT3847_93850C.1.pep
SKKGFEMMPYCPKSSNTTHRMTYSGQMIKERERVRRSVVDACSHEVGCHDRRMEDKELEGTKDVCMILITNIDKELCPLTITEFLRRHTSVSARVVIFPSFSMEVYTKGAIMVNSTREFQELCDFLNNPNRIITSSTGRPWVILEKVVGFKNIKASIGALVHTSEKIKRGTSNNLKVVHSGTKEFKIASNKRDLFFEFSEHQERLRKKLALEEGKIFAANEQLS

SEQ ID NO: 278880 - protein, 67 aa, Glycine max
  Clone ID: PAT_MRT3847_93851C.1.pep
STLFLFLFLFPLAHALFLRSCLFLENGPQIPISSLISPHFRFGFESVAFHCQGKGPYCLECLMAEFS

SEQ ID NO: 278881 - protein, 92 aa, Glycine max
  unsure (1)..(92): unsure at all Xaa locations
  Clone ID: PAT_MRT3847_93852C.1.pep
MNSRANVCKELNVXHKKTLEGLFKLPHNKECADCXAKGTEWARVHLGMFICMQSSRIHESLGVHIYKGRCATLDTWLSEHVXAFIQLMGNKK

SEQ ID NO: 278882 - protein, 568 aa, Glycine max
  unsure (1)..(568): unsure at all Xaa locations
  Clone ID: PAT_MRT3847_93853C.1.pep
MVADEASPFETSDMLATLLASTPLLSESWRLCTTVAATAPRSFMTEQHGGGAVVYVAFPGVEMAAGSDSICRNLVALDSIGGLPLHNKEGEEPVMVHAGMLNLFFSLFNSFQNQMLEIVGNKDTKSVVITGHSIGGATASLCTLWLLSYLQSISSSVSILCITYGAPLIGNESFSQTIFKERWGGNFCHVVSKHDIMPRXKSAPVLFHPFGSYFFVSSDGAVCVDCATSVIKMLHLMFASVSPACSIEDHLKYGDYVKNLSLQFLNQNNSVQGNIPDSSYEAGLELSVQSSGLGNQESAIEPAKECLKMTRRMGPSPTKNAANLSITLSKFVPYRTEIEWYKAWCHQQVDQMGYYDLFKRRRSTSKMAMKVNMNRHKLARFWNNVIEMWERNELPHDVAVRAKWVNASHFYKLLVEPLDIAEYYGKGMHTTKGHYIQHGREKRYEIFDRWWKDAMGNTEENNERRSKFASLTQDSCFWARVEEARDWLNSVRSESDTTKLAVLWDNIEKFEKYAMELIDNKEVSEDVLAKNSSYSIWMEDLRGLRELKAKVKTFSHHFNPFLDGEVIP

SEQ ID NO: 278883 - protein, 47 aa, Glycine max
  Clone ID: PAT_MRT3847_93854C.1.pep
VQVALGLFSTVSRVCHVQFKSGGPFLKLVQSSPVTLSPQAKTQKKKK

SEQ ID NO: 278884 - protein, 92 aa, Glycine max
  unsure (1)..(92): unsure at all Xaa locations
  Clone ID: PAT_MRT3847_93855C.1.pep
NCYSLYCSSEILFLHELPFFFFVVMQECINRISSLESMGRHSGVMDDRGIFLFISXXXMKXVAGHITXQGRVSLSLLASKSHPFGDSEPKVL

SEQ ID NO: 278885 - protein, 64 aa, Glycine max
  Clone ID: PAT_MRT3847_93856C.1.pep
KLVENNYDIYLYFNKLCYIFNAINLCINIAPHYQTFLDMSLTVMYIYTIVVNTGVAERSTPKVR

SEQ ID NO: 278886 - protein, 37 aa, Glycine max
  Clone ID: PAT_MRT3847_93857C.1.pep
VQVLSLESVLEHRVQCNPIATTHRVLNQYASDPLDSD

SEQ ID NO: 278887 - protein, 70 aa, Glycine max
  unsure (1)..(70): unsure at all Xaa locations
  Clone ID: PAT_MRT3847_93858C.1.pep
ISKTNSHSSPPPLSLLSPPSPSAXPPRPPPSPPHQPPSSPSSRPSCSDSSASSPPPPSTPASKPEMISRP

SEQ ID NO: 278888 - protein, 196 aa, Glycine max
  Clone ID: PAT_MRT3847_93859C.1.pep
QFVTQVHLAKTAAIVAKSAVNVAVARPAKAVRPMAALKPAVKAAPVAQQAAASKMMVWQPINNKMFETFSYLPPLNDEQIAAQVDYIVANGWTPCLEFAAADCAYVSNENTVRLGNSASCLYYDNRYWTMWKLPMFGCRDPMQVLREVVACTRAFPDCYVRLVAFDNVKQVQCMGFLVQKPKSAKDWQPVKGRSVQ

SEQ ID NO: 278889 - protein, 98 aa, Glycine max
  Clone ID: PAT_MRT3847_93860C.1.pep
LFLSCWGYSGLSSLGELICPQGRPIKHCLKYAVSFPPPRIGPYSFPTLGNRKMYGKCMTCIKQKGPHILYQLGILYKRNLEYGGVVATKLFMLEPVTQ

SEQ ID NO: 278890 - protein, 111 aa, Glycine max
  Clone ID: PAT_MRT3847_93861C.1.pep
KEPLKAKHQGGSRHEVEVKLPQGKYYYKFIVNGQWKHSTASPAERDDRGNVNNIIVIGETASVRPSVQHQQKDANVVKVIERPLNEKERFMLAKAARCIAFSICPIRLAPK

SEQ ID NO: 278891 - protein, 327 aa, Glycine max
  unsure (1)..(327): unsure at all Xaa locations
  Clone ID: PAT_MRT3847_93862C.1.pep
SQTSSQNQNLAPFSGVMAHTNSLPSALLASPVQTAREDIPYLPFPATQSMPTKYSNIASSIGGSTITMSEALRASNISXPQPNSQALPGANVATGPALPQHLAVHPYSQPTLPLGHFANMISYPFLPQSYTYMPSAFQQAFPGNSTYHQSLAAMLPQYKNSISVSSLPQSAAAAAVASGYGFGSSTSIPGGNYPLNPPAAPTSTTIGYDDVINSQFKDNNHMISLQQNENSPMWVQGPGSRTMSAVPPSNYYNLQGQNQQQPGGFRQRQQQQQQPSQHFGPLGYPNFYQSQTGISLEHQPQNPREASLGGPQSQPSKQSQQIWQNSY

SEQ ID NO: 278892 - protein, 123 aa, Glycine max
  unsure (1)..(123): unsure at all Xaa locations
  Clone ID: PAT_MRT3847_93863C.1.pep
SSCDLPQSQVSACCHSIYYSLIGSTDEDVLLLEESDESVHVNIRHTKDFLFVTVNTFSTTSSKLXLLSGLKLVWECDALAHCTIEHHRGYLYLFTDAPKGGRSVDXHYLLFSPVDDPSSARKW

SEQ ID NO: 278893 - protein, 477 aa, Glycine max
  unsure (1)..(477): unsure at all Xaa locations
  Clone ID: PAT_MRT3847_93864C.1.pep
SETNNDHGFAIDSNVEQTDEWPSIEHQPAVSVSLVVDGHPTSEYHTNSSNSGEANQQLKTHVNEFVAEDDPVENPDIVGSAKSISEENPESTSVFDGSLYKDINSYQPHRHPFENNEAEDGVSSVATNLEQLNLHSNDQGTEPEEENSSVVIPNHLQLHSAECLNLSFGSFGSANDASLSGSGPYASRPLKSNLEDTSGANDVSTIGSSDVRNPDYYADEHLTTTSDGNLAHITGVDAGTYEHSSISQSEALKSEPPETAQENQYSFXSSHEFTYENAQQPDVTYPHSQTSSQIQNLSPFSSVMAYTNSLPSALLASTVQTAREDIPYSPFPATQSMPSKYSNIASSIGGPSITMSEALRANNISTPQPNPQALPGANVATGPALPQHLAAHTLPRDILLIXWLHPYSQPTLPLGHFANMIGYQFLPQSYTYMPSAFQQAFPGNSTYHQSLAAMLPQYKNSISVSSLPQSAAVASGY

SEQ ID NO: 278894 - protein, 96 aa, Glycine max
  Clone ID: PAT_MRT3847_93865C.1.pep
HASAARGHRFIVKKTIEESIYKLNRSRAVCSTINRKSKNFKDEPVLTLKDVESLFPMAGPDEPLEQADQNYGDSLRSLPPSVAAGLAAERRRLMEQ

SEQ ID NO: 278895 - protein, 65 aa, Glycine max
  Clone ID: PAT_MRT3847_93866C.1.pep
WFMIKGKKLNEVSFKKVDVQRLILTLPRSLMEFASLVYLFLDFFSTIAYHEFIQTGPRINKFLLL

SEQ ID NO: 278896 - protein, 48 aa, Glycine max
  Clone ID: PAT_MRT3847_93867C.1.pep
ANKELIGSSARANLIPLPGKMEALNPLLFVPESACQFYAQSASTLTSV

SEQ ID NO: 278897 - protein, 57 aa, Glycine max
  Clone ID: PAT_MRT3847_93868C.1.pep
KPTTQTILNFFSKASHISSQFYHKLLTPIIHLQCYSPHSPIISYLNNTYHYISLLTS

SEQ ID NO: 278898 - protein, 72 aa, Glycine max
  Clone ID: PAT_MRT3847_93869C.1.pep
MQRKEKLGERIAALQQLVSPFGKTDTTSVLHEAIGYIRFLHDQVPVLCSPYLESSPSSYHQNQHDPSSNTWR

SEQ ID NO: 278899 - protein, 138 aa, Glycine max
  Clone ID: PAT_MRT3847_9386C.1.pep
MVKKRDSKFIQASSSFIILFSATMKSSGALATLVLLILLLATTSEAAISCSDVIKDLRPCVSYLVSGSGQPPAACCSGAKALASAATTSEDKKAACNCIKSTSKSININSQLAQALPGNCGITLPVAISPNADCSKVG

SEQ ID NO: 278900 - protein, 34 aa, Glycine max
  Clone ID: PAT_MRT3847_93870C.1.pep
NSGKGKKPPLPQKLYINYRSITKIHNASLVRFLK

SEQ ID NO: 278901 - protein, 86 aa, Glycine max
  unsure (1)..(86): unsure at all Xaa locations
  Clone ID: PAT_MRT3847_93871C.1.pep
PYSHYVKFKFTTSGQGYQPLLRCIKCCHSSLTVINFYGRIPXPLCNRRNPTKRYPYGSSSVPAMVLNPMLWALRCAPLITSAASGS

SEQ ID NO: 278902 - protein, 137 aa, Glycine max
  unsure (1)..(137): unsure at all Xaa locations
  Clone ID: PAT_MRT3847_93872C.1.pep
NGATKKEIGRAKEYIVXXLGLENGNAVEMGTIHAGDFMRRFCSNLCMNNQAVKAAQEAVQKSEEFDIRRSPISIAAAVIYIITQLSDDKKPLKDISLATGVAEGTIRNSYKDLYPHVSKIIPNWYAKEEDLKNLCSP

SEQ ID NO: 278903 - protein, 314 aa, Glycine max
  Clone ID: PAT_MRT3847_93873C.1.pep
MSDAFCSDCKRQTEVVFDHSAGDTVCSECGLVLESHSIDETSEWRTFANESGDNDPNRVGGPSNPLLTDGGLSTVIAKPNGGGGGGEFLSSSLGRWQNRGSNPDRALIIAFKTIATMSDRLGLVATIKDRANEIYKRVEDQKSSRGRNQDALLAACLYIACRQEDKPRTVKEICSVANGATKKEIGRAKEYIVKQLGLENGNAVEMGTIHAGDFMRRFCSNLCMNNQAVKAAQEAVHKSEEFDIRRSPISIAAAVIYIITQLSDDKKPLKDISLATGVAEGTIRNSYKDLYPHVSKIIPNWYAKEEDLKNLCSP

SEQ ID NO: 278904 - protein, 155 aa, Glycine max
  unsure (1)..(155): unsure at all Xaa locations
  Clone ID: PAT_MRT3847_93874C.1.pep
TIPGDFVLVVKLTTINNLXAYGLTPSISRSRLLGTIPQSISQLTVRNHMATVRTPSICDSSKQSSXQFSIDLLCGGILVDKTGDGSTLIQNAPIINLLRVAAWNNGWLMDKIAMSGNAGFIRSDWASLVHVFLTNSISTEHFDACVWTRSEPHSW

SEQ ID NO: 278905 - protein, 288 aa, Glycine max
  Clone ID: PAT_MRT3847_93875C.1.pep
MSFTYFFDSVKKISRHNRIMITKSKQSLTLFLLCTLLLTIAETSASVFNNVSCTSNKTFTPNSTFNTNLNTLLSYLSSNVTNNVRFFNATVGKDSNTVYGLYMCRGDVPFALCRECVGFATQTIPSSCPTSKEAVIWYNECLLRYSYRFIFSKMEEWPRHKINIPLGDPVVLHSNGFYTALGSIFDELPNKAALDLSESNGYAVKQENASGSVTLYGLAQCTPDLAAGDCILCVADAAAEFVKSCCGGSIGASVLFPSCIVRGKAKGIHYICFVQDVNVRKLHNLTGF

SEQ ID NO: 278906 - protein, 70 aa, Glycine max
  Clone ID: PAT_MRT3847_93876C.1.pep
GEGTKTRAFGISPPNNLGRNHQTFLPIMGVGRGATPVSPFLGSRAFFWVPHLFGGPAPRAPIVVSLAPAS

SEQ ID NO: 278907 - protein, 117 aa, Glycine max
  unsure (1)..(117): unsure at all Xaa locations
  Clone ID: PAT_MRT3847_93877C.1.pep
XDXXXXXXAXXXXXXXXSXXXPXXXXXHLPXXSRXYYXXXXLHSXFHXXXPXXXXXXXXXSVXXXXXHLYXPTNXTXXXXXXLYXXXXXLLXHXXTTNXXXXXLXXXXLIXXLXXIS

SEQ ID NO: 278908 - protein, 51 aa, Glycine max
  Clone ID: PAT_MRT3847_93878C.1.pep
MASHQFLDNFIIPDHILVPGSSDSEVENVGDVPHCPVLVFVNSKSGGQLGG

SEQ ID NO: 278909 - protein, 66 aa, Glycine max
  Clone ID: PAT_MRT3847_93879C.1.pep
FVSFHYFFQVNIIALFVFLPESTNNALPSLLSVCPCLAAHNITPFLASAKQQLVPFFLAPFLFVSF

SEQ ID NO: 278910 - protein, 51 aa, Glycine max
  unsure (1)..(51): unsure at all Xaa locations
  Clone ID: PAT_MRT3847_9387C.1.pep
MTNIGRNKIFSDRKFWFHNWSTIGLCNPLKFILFLESXTGGRPFCCLKRSS

SEQ ID NO: 278911 - protein, 31 aa, Glycine max
  unsure (1)..(31): unsure at all Xaa locations
  Clone ID: PAT_MRT3847_93880C.1.pep
TRADARNRTSXKKQHNGVLNKQSTYFTSVFL

SEQ ID NO: 278912 - protein, 85 aa, Glycine max
  unsure (1)..(85): unsure at all Xaa locations
  Clone ID: PAT_MRT3847_93881C.1.pep
TKLPHERXEDVLRLQIXNXPXASXQQXXXRAEAAAKGXAXXREQXNRXXDXXSRGGVXXXHXQDXXPXXQRXRGVIXSKXKAVQT

SEQ ID NO: 278913 - protein, 131 aa, Glycine max
  Clone ID: PAT_MRT3847_93882C.1.pep
MEDVKVVAWLISLFLWNWVLVVDGTDGLLSPKGVNYEVAALMSMKSKMNDELHVMDGWDINSVDPCTWNMVGCSAEGYVISLEMASAGLSGTISSGIGNLSHLRTLILQNNQLSGPIPTEIGRYVELQTLD

SEQ ID NO: 278914 - protein, 97 aa, Glycine max
  Clone ID: PAT_MRT3847_93883C.1.pep
KRVHEFSQEYWDLQLLFEIVGAVGSPITLDEATKSKTFGHFSCILMDVDLATTLHLEVMVERESYAFLVKVNYENFFPFVMSAKLLDTTSCSAKGGI

SEQ ID NO: 278915 - protein, 53 aa, Glycine max
  unsure (1)..(53): unsure at all Xaa locations
  Clone ID: PAT_MRT3847_93884C.1.pep
HYVAYATLEHVKAIADLRAILQEKMHTAMLLPCKHMXCEDCVSYRIERHWTCP

SEQ ID NO: 278916 - protein, 158 aa, Glycine max
  Clone ID: PAT_MRT3847_93885C.1.pep
QKFMIPDSRNRSKKFTIPINIKKIKIISNYDCEIKRHRRSGLKLAMRHVFKNWRSESALRHRNTIWTWRALLPHFISRRDDTTPLHHCSYDWISETCFTATMGTFMSAPQLSVEVFPHRTIDVMVEQLRWKDRGHLRSERGGRGRRDRGRKPSPGASL

SEQ ID NO: 278917 - protein, 145 aa, Glycine max
  unsure (1)..(145): unsure at all Xaa locations
  Clone ID: PAT_MRT3847_93886C.1.pep
MAIHMSASGSVSLTILFWLTSLEKSTAFQATEGDTESNNPHQYTHIVHLSSLLSTSSCRCSAKGAKRKASLEEGHRHGPCSQLKNHEGTAPHTTPHSEILNQDKDRVXCINSRISQNLGQDRSDRESVSATLPGKTGSLIESGNY

SEQ ID NO: 278918 - protein, 79 aa, Glycine max
  Clone ID: PAT_MRT3847_93887C.1.pep
VSAASKSAWPGRTPMVEVPQVVAPEELQPGHIQMHHHRQCEQHGSSASPVSTVSFGNVMCIFLPRRTGPITIGSTPSGR

SEQ ID NO: 278919 - protein, 53 aa, Glycine max
  Clone ID: PAT_MRT3847_93888C.1.pep
YVFNSLLYCLLVMHIYWWVLIFRMLVKQIQARGKVSEDVRSDSEDEDDNMKIE

SEQ ID NO: 278920 - protein, 134 aa, Glycine max
  Clone ID: PAT_MRT3847_93889C.1.pep
PTRPPTRPGETAIVGNRVGLMHGVTLGGTGKEIGDRHPKVGEGALIRASATILGNIKIGEGAMIAAGSLVLKDVPPHCIAAGIPAKVISGLQEHDPSLTMKHDATKDFFTHVATNFRDEKPNGAQHPDRNGMNI

SEQ ID NO: 278921 - protein, 42 aa, Glycine max
  Clone ID: PAT_MRT3847_9388C.1.pep
SLEVNCMLLHLAILFTFAAVFYLGISSETSCGSCALLLLDVQ

SEQ ID NO: 278922 - protein, 190 aa, Glycine max
  Clone ID: PAT_MRT3847_93890C.1.pep
AYAKYVKEYYIGTFGTDVQTYDQKYLKRTAMNEDNSARLWWFQVCTEVAYFQVAPSNDNIRSSKVDIKYHLDLCKNVFGEGIFPDVDATNLYYGGTKIAGSKIIFTNGSQDPWRHASKQTSSPDMPSYIVKCYNCGHCSDYRGCPQFPFSIEGNEKNCTSPDAVHKVRQKISEHMDLWLSECVDTGRSFI

SEQ ID NO: 278923 - protein, 139 aa, Glycine max
  unsure (1)..(139): unsure at all Xaa locations
  Clone ID: PAT_MRT3847_93891C.1.pep
DLDILGXYDTIAPNLRNLIPHYMRWHIVTLLIYILPYNLTVEMKYTRIQSDIKMSGLLYDGRYKFWTKHXKNLALTDEEKMEVIRNRGIPADALAKRAHEWEKHVAHESLKDQIPAVDKPDSTKVTTCAXIMNLKQSVD

SEQ ID NO: 278924 - protein, 72 aa, Glycine max
  Clone ID: PAT_MRT3847_93892C.1.pep
PLECNHPSRVMTPCSAHDQFVSLRVCRRVVGDRPQEFRAPEPPTGSSRVSVPKGVRLVKPICQGAGSSLANV

SEQ ID NO: 278925 - protein, 54 aa, Glycine max
  Clone ID: PAT_MRT3847_93893C.1.pep
TAATTPHKGGDNPSPSQNSPSGRSTGLKLRYPFTQPHTSSKASPKLNSPVIFLQ

SEQ ID NO: 278926 - protein, 57 aa, Glycine max
  unsure (1)..(57): unsure at all Xaa locations
  Clone ID: PAT_MRT3847_93894C.1.pep
MFLAXLTSQLVRSXVPWAGFSXSWPGSGVIGSHAFRXLYSLQPASPSRAASLPGXKH

SEQ ID NO: 278927 - protein, 110 aa, Glycine max
  Clone ID: PAT_MRT3847_93895C.1.pep
RLSSYNDLLIELERLFSMEGLLIDPNKGWRILYTDSENDIMVVGDDPWHEFCDVVSKIHIHTQDEVEKMTIGMMINDDSQSCLEQAPVMVEASKSSSVGQPDSSPTVVRM

SEQ ID NO: 278928 - protein, 53 aa, Glycine max
  Clone ID: PAT_MRT3847_93896C.1.pep
RLVLASPQNHHPPPCLDQVLSLSRGRENMGGDESSSQDACHSKTWLNPVSTGS

SEQ ID NO: 278929 - protein, 216 aa, Glycine max
  unsure (1)..(216): unsure at all Xaa locations
  Clone ID: PAT_MRT3847_93897C.1.pep
MSRQGQRSGATGVHHNRQYSEHYLDASSKWFNNSSSNHIPPLQDYNLYGGGGRMYRSNAQRSFNEYCLDPSTPPRSYAVKKNGNGYGEEDDSPRDFSPGLLDLHSFDTELLPQITSSNLYDSEPYIFGKQPVRARASENNVSNSVAAADMXKSSNVAKIKVVVRKRPLNKKETAKHEEDIIDTVSNSLTVHETKLXKVDLTQYVEKHEFVXDAVLM

SEQ ID NO: 278930 - protein, 68 aa, Glycine max
  Clone ID: PAT_MRT3847_93898C.1.pep
RVRAYFPFSPHSYLLSFLFLFIFLPFSPPYTQHNTHPFNISMKLSRSHLLSFLSFFVLTHSFLFQIMR

SEQ ID NO: 278931 - protein, 114 aa, Glycine max
  Clone ID: PAT_MRT3847_93899C.1.pep
MATTVRSLKIKTSTCKRIVKELHSYEKEVEREAAKTADMKEKGADPYDLKQQENVLAESRMMIPDCRKRLEAALADLKGLLAELEESDEKASPEIDEARNTIVEVEKVFETTED

SEQ ID NO: 278932 - protein, 51 aa, Glycine max
  Clone ID: PAT_MRT3847_9389C.1.pep
NTIYQQLDRMHCAGKRESYRTSAHLTLSLKKNTRVSRQYVNCERCGNFQRV

SEQ ID NO: 278933 - protein, 151 aa, Glycine max
  Clone ID: PAT_MRT3847_938C.1.pep
FALHFYFFSVLRWNLCLTLTLTLRGTTPPWHDMFRSASLRKPTSDPPPPPPPPSNADQKVNPSGDSQSQARLALYIAMAHAGLAMAILILFSLYKLLQQYLKPFQWAVLCSIPLRLIHQTIVCFWSHPLKLGLLHTLLALPLTVFTLFITT

SEQ ID NO: 278934 - protein, 114 aa, Glycine max
  Clone ID: PAT_MRT3847_93900C.1.pep
MATTVRSLKIKTSTCKRIVKELHSYEKEVEREAAKTADMKEKGADPYDLKQQENVLAESRMMIPDCRKRLEAALADLKGILAELEESDEKASPEIDEAKNTIVEVEKVFETTED

SEQ ID NO: 278935 - protein, 73 aa, Glycine max
  Clone ID: PAT_MRT3847_93901C.1.pep
LFVKGKLLEKSFFSYVLFFSYYSIKSIFYFPFCFLAPNRLSGFLESPSKFQQSYQQFSIAMLNVYFLRLSVEC

SEQ ID NO: 278936 - protein, 87 aa, Glycine max
  Clone ID: PAT_MRT3847_93902C.1.pep
QFLLVFLEGFFFCSVAYITYLSYNRQWRPSLRTTSIHVNIINKMDGNFMVRWNFTNSFIPPNISRKIKLEFSHVIKFYGVSGDSTLP

SEQ ID NO: 278937 - protein, 77 aa, Glycine max
  Clone ID: PAT_MRT3847_93903C.1.pep
GRPPNFKNIIKTFKTWDILFAPKTLEILKRVPPGPIKNFSPWINPTFRNQNFYFPNLLCPQFKIGKKSPRKKPPREP

SEQ ID NO: 278938 - protein, 406 aa, Glycine max
  Clone ID: PAT_MRT3847_93904C.1.pep
SSEWAFQRFLQEATAAGTSTSSPPQPPTMTASSSSSSHQNDVVEIKDENLSIPNLNPSTALNSKPASSFGLAPPPNIAVDSEEYQAFLKSQLHLACAAVALTRGKSLNPQDSGSTAHDKGSETASAAQSGSHVSTLGSGQEVAKIQDKDAGGPVGIPSLPPVQKKPVVQVRSTTSGSSREQSDDDEAEGEAETTQGMDPADAKRVRRMLSNRESARRSRRRKQAHLTELETQVSQLRVENSSLLKRLTDISQKYNEAAVDNRVLKADVETLRTKVKMAEETVKRVTGLNPLFQAMSEISSMVMPSYSGSPSDTSADAAVPVQDDPKHHYYQQPPNNLMPTHDPRIQNGMVDVPPIENVEQNPATAAVGGNKMGRTTSMQRVASLEHLQKRIRGEVSSCGTQGRGEQ

SEQ ID NO: 278939 - protein, 321 aa, Glycine max
  unsure (1)..(321): unsure at all Xaa locations
  Clone ID: PAT_MRT3847_93905C.1.pep
MKAPSSLFLKGHVLPSSIFLLRNSKGTPNVKMHPIWCLCKAIQTNSYEISNGSYHPTVQQTTEKKTMEKLSRKVESIGAFQKLPIVMPSIDIIGSALRKARKVSPTKGIANIAKREKNKGAKQLDALMKEIAVPLRTYVENFPNKMHLHPYERSLIELTLGDGYYEMVLRKVDSLRKRVVSVGKEHASLCAKSSSKREAEERLNEGLKKIEEIFAQERKVVDDLLGIAKTLRAMPVINLETPTLCLVGAPNVGKSSLVHVLSTGKPEICNYPFTTRGILMGHIILNFQKFQVTDTPGLLRRHDEDRNNLEXLTLAXLSHLP

SEQ ID NO: 278940 - protein, 95 aa, Glycine max
  Clone ID: PAT_MRT3847_93906C.1.pep
MFSFQKIYLLLTVLFLLGKPVISKDRCREKCGRVHIEFPFYLRNNNLSHTTGHHPGFDLFCNDKDETVLELPAVPIKLFVKKIDYKSQQIQIYDP

SEQ ID NO: 278941 - protein, 72 aa, Glycine max
  Clone ID: PAT_MRT3847_93907C.1.pep
LCFVLIFLIGQRNLSSIVMWHCHLVVEGLCAYPIFCLFFFLIISYQLLFLKLCFNHSSNVNHLNLDLTISQL

SEQ ID NO: 278942 - protein, 115 aa, Glycine max
  Clone ID: PAT_MRT3847_93908C.1.pep
WERSDCVCGFIRDAVRRVPSILFRTLAAPRAATYFAVPNRLIQAALYGSATGASRSHRRRFSSLLGPFAAASLGVAGALIFQEVLAKEPPPFRAFSNDVDLYQIEACPLCNKVKA

SEQ ID NO: 278943 - protein, 71 aa, Glycine max
  Clone ID: PAT_MRT3847_93909C.1.pep
DRIHERGSPFFFNKVLFFNNNRSIFSLTEERDLLSSTENNYSTLINIHHRTDRVALGGTNPSRSTHIIQSN

SEQ ID NO: 278944 - protein, 432 aa, Glycine max
  Clone ID: PAT_MRT3847_9390C.1.pep
MEKWWFNSMLFNRKLEYRCELSKSMDSLGPIENTSLREDPKILTDIEKKIHRDLDYLEMEGFFSSDLNTVSKNDDDHYMYETQFSFNNNITSFIDSCIESFNLGDIDKYNDIYFYSYIFLKGRNCSESDNSSTSIITSTNDTNDSDSTIGESSNNLDESQKYKHLWLECENCYGLNYKKFFKSKMNICEYCGYHLKMGSSDRIELLIDSGTWNPMDEDMVSLDPIEFHSEEEPYKDRIDSYQRKTGLTEAVQTGTGQLNGIPVAIGIMDFQFMGGSMGSAVGEKITRLVEYATNQLLPLILVCASGGARMQEGSLSLIQMAKISSALYDYQKNKKLFYVSILTSPTTGGVTASFGMLGDIIIAEPNAYIAFAGKRVIEQTLNKAVPEGSQAAEYLFHKGLFDSIVPRNLLKGVLSELFQFHNFFSLTKNDKA

SEQ ID NO: 278945 - protein, 132 aa, Glycine max
  Clone ID: PAT_MRT3847_93910C.1.pep
ESVSIDDTNVRSGQGTCTTNGVEHSLSKPLLEVPSYDNVNPALEKESKRHSKCNNVMSHSHAEPTQPPPPPPPLPPTQWRVSKPQLDMTNGTHHLSEDAEHIDDHGIPHSTIFQQPKLTQVEHYQIITMIMN

SEQ ID NO: 278946 - protein, 74 aa, Glycine max
  unsure (1)..(74): unsure at all Xaa locations
  Clone ID: PAT_MRT3847_93911C.1.pep
MGXEKVHIXXVVIGHVXLXTXTNTGXLIXSLEGIDKRVIERFEXEAAEMXXEVFXKYAWVXDXXXAEREXGITI

SEQ ID NO: 278947 - protein, 51 aa, Glycine max
  Clone ID: PAT_MRT3847_93912C.1.pep
CRIMCQLFTYFGKPQFNNQLRHLLANFFLFATCGLRRDATCIRVLFFYLAK

SEQ ID NO: 278948 - protein, 92 aa, Glycine max
  unsure (1)..(92): unsure at all Xaa locations
  Clone ID: PAT_MRT3847_93913C.1.pep
SCDXYLQKASIFISNRFVFFVSHNTKAYIFLVSLYCMQRRWKSILQRQFLSKNSTSMGSFSLFFWFMVKFFSSLSALSNVFILSYTHSFGVL

SEQ ID NO: 278949 - protein, 45 aa, Glycine max
  Clone ID: PAT_MRT3847_93914C.1.pep
CNGTRPNCIYMWGKDIFNKRTCTRFLSYAKLNFLEPTTVTYCKRD

SEQ ID NO: 278950 - protein, 73 aa, Glycine max
  Clone ID: PAT_MRT3847_93915C.1.pep
VSLKIPIFVSCWKNMSYTDASGLYAYGANGSATSLDNLGSFRNEFFPKLFLTFFTYYHVCNMMFFALNEDNIF

SEQ ID NO: 278951 - protein, 52 aa, Glycine max
  Clone ID: PAT_MRT3847_93916C.1.pep
RDTLHRLSANRHLAQLDHWNIIGLASRLAKTYSKTKKKLCLAGQARLAQFKN

SEQ ID NO: 278952 - protein, 53 aa, Glycine max
  unsure (1)..(53): unsure at all Xaa locations
  Clone ID: PAT_MRT3847_93917C.1.pep
PIDSCNPAASSALTMMVASPSPSAMSLLMSSXKSICRVERKGRKIDFSSPFFF

SEQ ID NO: 278953 - protein, 110 aa, Glycine max
  unsure (1)..(110): unsure at all Xaa locations
  Clone ID: PAT_MRT3847_93918C.1.pep
LEKLWXDNGFGXXXXXGXGKLRKLITLKTIDDXEIVASCIRRXSLPATPTTPMTPTTPTTPGSARKADNVWRSVLHPVINSPTKTIGAQMLDKPLAITATGCDGLFSGDT

SEQ ID NO: 278954 - protein, 64 aa, Glycine max
  Clone ID: PAT_MRT3847_93919C.1.pep
NWARLVGQSQLQPAGSVPHPVGHHKSASSRQLESHSLDLVFDNTPPSFNVICLSKFRLLPWCSS

SEQ ID NO: 278955 - protein, 264 aa, Glycine max
  Clone ID: PAT_MRT3847_9391C.1.pep
MARGLKKHLKRLNAPKHWMLDKLGGAFAPKPSSGPHKSRECLPLILILRNRLKYALTYREVIAILMQRHVLVDGKVRTDKTYPAGFMDVVSIPKTNENFRLLYDTKGRFRLHSIRDDEAKFKLCKVRSVQFGQKGIPYLNTYDGRTIRYPDPLIRANDTVKLDLEENKIVDFIKFDVGNVVMVTGGRNRGRVGVIKNREKHKGSFETIHVQDATGHEFATRMGNVFTIGKGTKPWISLPKGKGIKLSIIEEARKRIAAQQATTA

SEQ ID NO: 278956 - protein, 71 aa, Glycine max
  Clone ID: PAT_MRT3847_93920C.1.pep
VLRLNFLFSPCFFPKMFRHKATRSCHLVQVFPFRKQGELKKFLVSGPALGRHIYTPRACSTFPICWVINHA

SEQ ID NO: 278957 - protein, 79 aa, Glycine max
  Clone ID: PAT_MRT3847_93921C.1.pep
THLNCLLNLLESSFRSFFRPVLHAAARVVQEMGKSRAAAFALGIQDVEEGAHVNTFAEATDYNDSDESTHPESNAYLFV

SEQ ID NO: 278958 - protein, 274 aa, Glycine max
  Clone ID: PAT_MRT3847_93922C.1.pep
MHSVICNSAVSLSPYHSCRRKPNRLRAKSSLLVQKQEAQPARLLMNVGACERHSVICSTVVSLSPYDSCRRNPNRLRAKSSLLVQKQDAQLSDSDSDSVSVSRRLILLRHAKSSWDNRSLRDHDRPLSKSGKEDAVRVSRRLQQLGWIPELILSSDAARTKETLKIMQEQVQELVEAEVHFVSSFYSIAAMDGQTAEHLQKIICKYSRDEILTIMCMGHNRGWEEAASMFSGASVELKTCNAALLESAGKSWDEAFATAGFGGWKLQGIIKPSS

SEQ ID NO: 278959 - protein, 181 aa, Glycine max
  unsure (1)..(181): unsure at all Xaa locations
  Clone ID: PAT_MRT3847_93923C.1.pep
MHSVICNSAVSLSPYHSCRRKPNRLRAKSSLLVQKQDTQLGEPLSDSVSVSRRLILLRHAKSSWDNRSLRDHDRPLSKSGKEDAVRVSRRLQQLGWIPELILSSDAARTKETLKIMQEQVQELVEAEVHFVSSFYSIAAMDGQTAEHLQXIIWRYSRDEEPTIMCMGHNRGWEEAAHWFLG

SEQ ID NO: 278960 - protein, 98 aa, Glycine max
  unsure (1)..(98): unsure at all Xaa locations
  Clone ID: PAT_MRT3847_93924C.1.pep
SXARVRKLGIRLEXXXLXLSRMXWWNVYXXXXWXXXTXXXWXPXDANDXQXVLXLXKXXXKAXRXTMXXFAXFXIRXXXXXGVPGSPXQLGXXSXEFP

SEQ ID NO: 278961 - protein, 636 aa, Glycine max
  Clone ID: PAT_MRT3847_93925C.1.pep
MSSNSGAVKGREFPLPRCPCPSSNSNAPSLDLWSQIVAAETPRPERIDVVYRRRHPRNPQNHANSKPPDSAIPRPPRQSLADPNKRVSWNRSLSTRGRTSIAVGAFMVYQPQLKKDKRKGKPALPKGKVVQPPNVDKERIYFQEVDAYELLEESPSPKKSTWTIGNMTQQEPIPAVCSRLEKWLHSRRLNPFCGPSSTLSKILDTPSTRLETIRDIDFGASDLKTLERTDRSNSLLHTIKTEEKETSIENGSHLQTNEKMLFAQSGEGCEDIEAGVKKLSLVSTSSSIDDDHINPFSVLLSICGQSAPSVLQDIFSSGSETIVKVGEGTYGEAFKINNYVCKIVPFDGEFRVNGEVQKRSEELLEEVLLCKTLNQLRGKDGDSDNLCSAFIDCIEFRVCQGPYDASLIQAWEDWDLEHGSENDHPKEFPDKQCYVVFVQEHGGKDLESFALLNFDEARALLVQVTAGLAVAESAFEFEHRDLHWGNILVGRSDSETLQFTLDGKTMLVKTHGLIISIIDFTLSRINTGDSILYLDLSSDPDLFKGPKGDKQSETYRRMKEVTEDWWEGSCPKTNVLWLIYLVDILLMKKSFERTTKHERDLRSLKKRLDKYDSAKEAILDPFFTDLFVESDPNLTI

SEQ ID NO: 278962 - protein, 92 aa, Glycine max
  Clone ID: PAT_MRT3847_93926C.1.pep
LNFILPLVSKPPATDNFLASWPSPSYIGPFQFPFPGLVYVSVSGFSSHLPSFWVLHWAYLEIGASCTGGSAFGKGFPVLFLRLLPFLASLSV

SEQ ID NO: 278963 - protein, 69 aa, Glycine max
  Clone ID: PAT_MRT3847_93927C.1.pep
HAYELTSTRGYQEYLFVQEEAAYTDFTTESDDPRLTNFYTCSTQSRSRELWTLDHNLLLANNGLARYLR

SEQ ID NO: 278964 - protein, 173 aa, Glycine max
  Clone ID: PAT_MRT3847_93928C.1.pep
NIHSWYYFSEFGLMVYSMTKNRYCERIGRQHKSNNVIYVVDLRMAVYYQKCHDPDCRGYRSPSRQIPVHVFSNPSDVIGSFGLLDDEQPVDDKLRHQLDDNKEQNLLQFKDTVEDNSNDSWWLEAIRVVEDMENKQTKTEEVIDEDEEWWQAVESTASQVELTCSSQQELCAI

SEQ ID NO: 278965 - protein, 71 aa, Glycine max
  Clone ID: PAT_MRT3847_93929C.1.pep
DPGLGQWFVVLKVRPGRTKGGIWGDFNGGGQRKAGLEIGSPLPIGVPGKRNYWGRKSVFRCKQIKNSFLGP

SEQ ID NO: 278966 - protein, 88 aa, Glycine max
  Clone ID: PAT_MRT3847_9392C.1.pep
MVKLRLKRCGKKQPVYRIVAIDVRSRREGRDLRKVGFYDPIKNQTYLNIPVILYFLERGAQPTGTVQDILKRAGVFMELSSNQQTKFH

SEQ ID NO: 278967 - protein, 87 aa, Glycine max
  unsure (1)..(87): unsure at all Xaa locations
  Clone ID: PAT_MRT3847_93930C.1.pep
REGPALFFFFFFCWPXPNQTRLRGHIGPDKGALQDAQMPSLIVLLRLLTTLQLSFIISCHSVIMLYIYHGKASKFTRPCVHPCLKTT

SEQ ID NO: 278968 - protein, 41 aa, Glycine max
  Clone ID: PAT_MRT3847_93931C.1.pep
MRSQIHLLWGTLLYERSVVEYKLGLPTWEECGLGTEYGYLK

SEQ ID NO: 278969 - protein, 89 aa, Glycine max
  unsure (1)..(89): unsure at all Xaa locations
  Clone ID: PAT_MRT3847_93932C.1.pep
HRHRXQSCRKSFCLHXAPAKIALSSQPRMNSXFPKEMKCRWWPIHSHSILFLLLXLLFSTTQFLSQLXTHXHNGKHFPPIXHERIGGXK

SEQ ID NO: 278970 - protein, 112 aa, Glycine max
  unsure (1)..(112): unsure at all Xaa locations
  Clone ID: PAT_MRT3847_93933C.1.pep
TCYWFCMGCLHIVPWFVIRSWVHPTILLLFFTVHYVVYHMSPFSLSKRSLIKLLAYFRESLCPSTFFWDMNMIVCMRLLXLCSLMAISMAFRFHLCMVIWWLHCFFLFTVIL

SEQ ID NO: 278971 - protein, 372 aa, Glycine max
  unsure (1)..(372): unsure at all Xaa locations
  Clone ID: PAT_MRT3847_93934C.1.pep
MEKINSGGSSIRRRSLSISSHISHHTDNDDDAECESVSEAGDIGDRVTIRSCSFRLSFDNRSENEAVVVSNSEEHRLHPNSVRPLPPALTSEDTKHDPHKRLPVLLDYASFMIPLAVFGILGVFTRYLLQKLFGPGVAHVTSDQSILYVDLPSNMVYXLVGYSIIFGIETAKSFRGFLNRLNISSGKEGSKIFINCKVDSYRCQLIVMAISVVALGILWGVSGALVKAEFKNGGNVAQLWFACMVGPIGVWIRWFLARLNGRGLGKAGLFKWIPFGTLIANVSAACIMAALSTVKNAVNTRDCDTAVAGIQFGLMGCLSTVSTFAAEFNAMRESSRPMRAYAYAIITVFLSFSLGILIYCIPVWTKGLDIDT

SEQ ID NO: 278972 - protein, 30 aa, Glycine max
  Clone ID: PAT_MRT3847_93935C.1.pep
NTIYRSIYKKHDVVNFTLELISYNVIRSEV

SEQ ID NO: 278973 - protein, 234 aa, Glycine max
  unsure (1)..(234): unsure at all Xaa locations
  Clone ID: PAT_MRT3847_93936C.1.pep
MERISSGGSSIRRRSLSISSHISHHTDNDDAECESVSEAGDIGDRVTIRSKRISESSSSFRLSFDNRSENEAVVSIPEEHRLHPNSVMPLPPAARTSTSPLSTDAIVGSQDTKHDPHKCLPVLLDYASFMVPLAVFGILGVFSRYLLQKLFGPGVAHVTSDQSILYVDLPSNMIGSFLMGWFGVVFKGDIINVSEHLAVAITTGYLXSLTTFSGWNQXMLELSVSGHWLFAALG

SEQ ID NO: 278974 - protein, 72 aa, Glycine max
  Clone ID: PAT_MRT3847_93937C.1.pep
DLTKVSDPITGGIGICKFGPSCKFDHPIYLQAAMIPELGQQSYSYSSRAVVAEIFGSTRVRTDATFQQSVQT

SEQ ID NO: 278975 - protein, 69 aa, Glycine max
  Clone ID: PAT_MRT3847_93938C.1.pep
LITKHFLTKMAEMIDRLGGGDEKWIRERPPRLVAGGSRMAIVRKSWRVDGESSGFRSQYCIHLMRAINT

SEQ ID NO: 278976 - protein, 84 aa, Glycine max
  Clone ID: PAT_MRT3847_93939C.1.pep
DPHTTIQNTKKNATILKEINRQHKRPSEPQGGPHEGLATEANMEKWGETQIHGDPKKMGPKGPQKIPQRILGAKSHTQRTDLRD

SEQ ID NO: 278977 - protein, 220 aa, Glycine max
  unsure (1)..(220): unsure at all Xaa locations
  Clone ID: PAT_MRT3847_9393C.1.pep
MMIIDPPIAVRFHAAAAFRSAAAPPPHSNRSMWSADDLNGVRYFASCRLACSCGFDAPWVRSKINTGTPFTRRDKLVKNRIRASSEHLGSAQDPVKKNEKPSYHPFEEVSVSTSENSEDATLTTAETSRTIIEVNSKATLMFSSLISDEFHENIIWPDLPYLTDEHGNIYFQVKNGEDILQSLTSENNFVQVIVGINSMEMISXMDLSGPSEIGFGEGRN

SEQ ID NO: 278978 - protein, 97 aa, Glycine max
  Clone ID: PAT_MRT3847_93940C.1.pep
TFPSRGGQQKKATPKRPQEEETPPKVAQERAEEGPDRADEEDPPEEAATSAALNGAEGPHYMERQPPATSEGKPQGLTRKKGEKGKRRPDPGDGEQT

SEQ ID NO: 278979 - protein, 45 aa, Glycine max
  Clone ID: PAT_MRT3847_93941C.1.pep
SNQVDWFSLIWSALYQLELILIDPKINYQFYEYFFYMNSYFVKNI

SEQ ID NO: 278980 - protein, 74 aa, Glycine max
  unsure (1)..(74): unsure at all Xaa locations
  Clone ID: PAT_MRT3847_93942C.1.pep
ENHLVQKPLTGQEGNLSSRASEFRTATVXKIDKPQATAMHGGASEIINDSVARPDCNIDGAMLLGDTYHTNPEN

SEQ ID NO: 278981 - protein, 83 aa, Glycine max
  unsure (1)..(83): unsure at all Xaa locations
  Clone ID: PAT_MRT3847_93943C.1.pep
LLASLANLALPRTINLLGELSVVVTTLSXSDITLLXLTGLNILVQGLYSLYIFTRTQWGSVSHHIKNIKPSFTRDNTLMVIHL

SEQ ID NO: 278982 - protein, 414 aa, Glycine max
  Clone ID: PAT_MRT3847_93944C.1.pep
MDAIRKQLDVLMGANRNGDVREVNRKYYDRDVCRLYLVGLCPHELFQLTKMDMGPCPKVHSLQLRKEYEEAKAKGTDNYDRELEDVIDKLIGECDRKIGRALKRLEDDDAKAAIAISVSEVTQTDEVLELSKQIKEKLKEADQYDLEGKSDLKIRALEVVEELRTKRADKQSMLLLDAFNKDRASLPTPLPNPPPLAPLPVVAPDARTQEMINEKLKKAEDLGEQGMVDEAQKALEEAEALKKLPARQEPVLDSSKYTAVDVRITDQKLRVCDICGAFLSVYDSDRRLADHFGGKLHLGYMQIREKLAELQEERNKSRKTDRLDDRRSKDRSRDRDRESSRDRELGDSRERGRDHDRRSRDHDRHYDRDRGYDRDRDRDSDRTRSYDSRSRRRSRSRSRERSRDYDRHRRHDRY

SEQ ID NO: 278983 - protein, 152 aa, Glycine max
  unsure (1)..(152): unsure at all Xaa locations
  Clone ID: PAT_MRT3847_93945C.1.pep
KTRPPIKTPLQQPATPPPVXHGLRCFSIIVHETSCQSNWVYHPQPFDLSLSLALGCHWPALSPSSPPTXMVSSYYTRVPRRPRPKFSSIALLRANFVSSLSPSRFYVPRNIPHFNYFAYRNPSISALSKYSSWFAPPPPPPPPPPKKEDVIQ

SEQ ID NO: 278984 - protein, 275 aa, Glycine max
  unsure (1)..(275): unsure at all Xaa locations
  Clone ID: PAT_MRT3847_93946C.1.pep
PRVRFYKAQKAKDKEENENLVEELDKDFTSLVHSEALLSLTEPNKMNALKALVNKSISNEQSNKDYMSATRTMDNSVQEKPDDYDKLVKQMGLEMRARPSDRTKTPEEVAQEEKERVXQLEEERQKRMVAAEDSSDEDSEDSEKPSEQKPRSISGDDLGDSFSVNKQIMTKKGWVDEILKRRDEKDSASEDDDGEDSDNLGSSGDADEGSDEDLDEHEKDLSLKDWDQSDDDDIGADLEDEDDSDEDIETASEDLDEVKGLDAAVHIKAKRNASV

SEQ ID NO: 278985 - protein, 95 aa, Glycine max
  Clone ID: PAT_MRT3847_93947C.1.pep
KKLGARKLENKPVPPCHPIRNPYVVGGCPNVPKKSGFGVGLKGEKGVILKTVVVSPRDKKKWGRPHGSSKVLNKKQGYETISHLFIVGHFFWPPN

SEQ ID NO: 278986 - protein, 102 aa, Glycine max
  Clone ID: PAT_MRT3847_93948C.1.pep
MFSLSKPILSPVRPTLPPVRCGSRELRERIKTVQTTQKITEAMKLICAARVRRAQEARVSGRPFSSNLAAMLNDITQRLQNDDVCTPLTLARPVRTVALVVV

SEQ ID NO: 278987 - protein, 70 aa, Glycine max
  Clone ID: PAT_MRT3847_93949C.1.pep
MFSINHYFLKFTRMNTTFLLGRKYYLLVYGGQKEKRERRTYMNRTPLCTGKILKTHAPRKNILMSSTLNI

SEQ ID NO: 278988 - protein, 264 aa, Glycine max
  Clone ID: PAT_MRT3847_9394C.1.pep
MARGLKKHLKRLNAPKHWMLDKLGGAFAPKPSSGPHKSRECLPLILILRNRLKYALTYREVIAILMQRHVLVDGKVRTDKTYPAGFMDVVSIPKTNENFRLLYDTKGRFRLHSVRDDEAKFKLCKVRSVQFGQKGIPYLNTYDGRTIRYPDPLIRANDTIKLDLEENKIVDFIKFDVGNVVMVTGGRNRGRVGVIKNREKHKGSFETIHVQDSTGHEFATRMGNVFTIGKGTKPWISLPKGKGIKLSIIEEARKRIAAQQATAA

SEQ ID NO: 278989 - protein, 54 aa, Glycine max
  unsure (1)..(54): unsure at all Xaa locations
  Clone ID: PAT_MRT3847_93950C.1.pep
MLEGYSPMYHTKESSPTGKVYAGATTGLTIWTETLLGLXAGGALLVYNTRALVQ

SEQ ID NO: 278990 - protein, 85 aa, Glycine max
  Clone ID: PAT_MRT3847_93951C.1.pep
MLRYYMNSLTVATQLFEDYNADPTQIAHMEDGRSTVIDKSESRKHFELHGGEETGKKDTECSDLTNARYKGTSSFFKCSNCLISS

SEQ ID NO: 278991 - protein, 150 aa, Glycine max
  Clone ID: PAT_MRT3847_93952C.1.pep
TLRHHTRGRSGKTGLWRFSVRLRGRFQLLLLVRERICCPEFKTSGRGSETMMVEIFGRGRRGREKTKHIRRPFVTATYLFATNSARSAGLSEQRYTKPNPRPRGRNVQRGDCDCAISLYFSTSCAVSWSMKTVQHERRGGENCSCSSRSQ

SEQ ID NO: 278992 - protein, 85 aa, Glycine max
  Clone ID: PAT_MRT3847_93953C.1.pep
FLQPLEGEPINVQTINLWGSKLEHPLVYSPLAKKGAPKKKKVFWGATELPGLKMEGNQSRKRALISFHFLGAQNLKRFLLGGPGL

SEQ ID NO: 278993 - protein, 52 aa, Glycine max
  Clone ID: PAT_MRT3847_93954C.1.pep
YAKGGFVHWYVGEGMKEGMFFKAGKVFVALKKDYKKVGEEEIKNGDKEEVYI

SEQ ID NO: 278994 - protein, 182 aa, Glycine max
  Clone ID: PAT_MRT3847_93955C.1.pep
LLCVFLHSLKLSIKLDDRKFLLWNQRVGGIVAMQKLHCLLVNPTIPSKYDSDLDRQLDRMFVEYGKWFIQDQSLFTWLLSTLSESVLSRVLNCHHGHEIWDKSHTQYYATLKAKVRQLRSELKTTKKGNRSIAEYTLRIHALVDSLIAIGETISDQELLDVVIDGLSEEYSTFVMMKLNHYW

SEQ ID NO: 278995 - protein, 83 aa, Glycine max
  Clone ID: PAT_MRT3847_93956C.1.pep
LLNATHVQNTTPLMGWRGRGRDPLLFFSHLKANAICRIYIFANSHIFYCLANYNSSSHMRLDTDIKSISYKLIFTYDIAHHNE

SEQ ID NO: 278996 - protein, 37 aa, Glycine max
  Clone ID: PAT_MRT3847_93957C.1.pep
VWRCLCDSIKVIWARISKQTCEQHYQVQFSYHSLTTL

SEQ ID NO: 278997 - protein, 56 aa, Glycine max
  Clone ID: PAT_MRT3847_93958C.1.pep
AHKIYTITISTSLFAIALPFQIYLPKIPFYRKIDYGIYLRSSPIKSKHKWLWTRSR

SEQ ID NO: 278998 - protein, 57 aa, Glycine max
  Clone ID: PAT_MRT3847_93959C.1.pep
NFHSLQLKICKQGAQENLHPNSKDKKDLTLTLNRCLYLQLISQFHTHITHRTHQSEI

SEQ ID NO: 278999 - protein, 63 aa, Glycine max
  Clone ID: PAT_MRT3847_9395C.1.pep
LFIITMIMTAAIELINLVFERIEIDFIQISQLSMMNTNLDINGTYPPIICSFLQKILQADSIL

SEQ ID NO: 279000 - protein, 149 aa, Glycine max
  unsure (1)..(149): unsure at all Xaa locations
  Clone ID: PAT_MRT3847_93960C.1.pep
MTQNAIVSKTKSGIKGDIAVAQKPLAAPPPPGYIPIPRRRVLKNLEINGGQRINAWVDSMRASSPTNSKSTSSLXKEHSSWILRHPSALDMFEQIMDASRGKQIVMFLDYDGTLSPIVDDPDHAFMSDSMRRTVRKLAGGFLLYSYRRC

SEQ ID NO: 279001 - protein, 71 aa, Glycine max
  Clone ID: PAT_MRT3847_93961C.1.pep
FLVMKIKIHSIIIHAVFLVYCPREGEGERYLPSSILSNVMIYILFSDTLEIITIYYAQPNLNTTIYIYINM

SEQ ID NO: 279002 - protein, 76 aa, Glycine max
  Clone ID: PAT_MRT3847_93962C.1.pep
TTPKPQLTLKNHSLIYNLVSQRCLGSTYGSPPSSTCKLAYGYTLGANRGLEGLAFHTGHNSREPKKLNSPHRPANG

SEQ ID NO: 279003 - protein, 67 aa, Glycine max
  Clone ID: PAT_MRT3847_93963C.1.pep
GYLFFFTIILLHYTQCAAYSNFLTAYRTTSSARKKTPAKGNSIASTCLRTGEKQTFYECQIPSRTIQ

SEQ ID NO: 279004 - protein, 84 aa, Glycine max
  Clone ID: PAT_MRT3847_93964C.1.pep
AGVLGIYGLIIAVIISTGINPKAKPYYLFDGYAHLSSGLACGLAGLAAGMAIGIVGDAGVRANAQQPKLFVGMILILIFAERLL

SEQ ID NO: 279005 - protein, 67 aa, Glycine max
  Clone ID: PAT_MRT3847_93965C.1.pep
RRRQNRRHLCESWVWFLSERWSSSPFCNFLFHSLLLALLFLSLFGSFPDNSTIFPITSGNVMLIIIF

SEQ ID NO: 279006 - protein, 55 aa, Glycine max
  Clone ID: PAT_MRT3847_93966C.1.pep
ALSGTMGSTSFMRKQPMTTKSLKTFPNALFGLKGGPGGRVTYMTSYKVKLITPQR

SEQ ID NO: 279007 - protein, 59 aa, Glycine max
  Clone ID: PAT_MRT3847_93967C.1.pep
MAASDEIYELPTLTDDPQYPKTLFFLDDFHPDTTILFHSSKTPSALAFGVYTSAIGFFR

SEQ ID NO: 279008 - protein, 99 aa, Glycine max
  Clone ID: PAT_MRT3847_93968C.1.pep
INFVKLVVLIVIIFIIVQIIFFDIDLICISFDIVVFIILFEICNIILIILSIIFFHVDVLYISFVIIVIVVSLINNLLILLLYLLTIDTFRFQIILLCR

SEQ ID NO: 279009 - protein, 55 aa, Glycine max
  Clone ID: PAT_MRT3847_93969C.1.pep
GMALWSTRSKESLLFPFQQLALGARAPRCQRENQCARMLIARNVYSSESLYLYCI

SEQ ID NO: 279010 - protein, 269 aa, Glycine max
  Clone ID: PAT_MRT3847_9396C.1.pep
TRWVLLRQESKFADWQRVRMQETSKEIPAGSLPRSLDVILRHEIVEQARAGDTVIFTGTVVAIPDIMALASPGERSECRRDASQRRGSTAGNEGVSGLKALGVRDLNYRLAFIANSAQICDGRREIDIRNRKKDADEDNQQFTDQELEEIKRMRSTPDFFTKLVESIAPTVFGHPDIKRAILLMLLGGVHKFTHEGINLRGDINVCVVGDPSCAKSQFLKYTSGIVPRSVYTSGKSSSAAGLTATVAKEPETWEFCIEAWCLMLADNGI

SEQ ID NO: 279011 - protein, 217 aa, Glycine max
  Clone ID: PAT_MRT3847_93970C.1.pep
ARERYEKTTEGEREIRELIEQRDLAQSQVEDLLRMVGNDQKSRKERMNTWEDDDSTSESSSIYPSDLRIREFNNPHYNNENSESSPDKHPDECCKEILSVELEESSRDDLEYANPSVSDNGVLALTLYGEENVISQEIPTPVNEDREDRQNQLTYGVLEHRIDDSQLSNDSALTMSETVSNCMNLKLIRSWSCREYYMTGSPEKTGEMQRTPASSSK

SEQ ID NO: 279012 - protein, 82 aa, Glycine max
  unsure (1)..(82): unsure at all Xaa locations
  Clone ID: PAT_MRT3847_93971C.1.pep
INNNLTLINVFLYTNNSSLSGPYXGTLENIYQKSLYIYYSLDHFPINIFNLLXNLFLMIQSHHTDITQPFTTLIFPTPLIFY

SEQ ID NO: 279013 - protein, 96 aa, Glycine max
  Clone ID: PAT_MRT3847_93972C.1.pep
IYPGECGEDEEELSAYAYPLLASAYDPPCGELRRAPPGPHWTNRRLLNYLKARSAPNPPPRRGYRSAPHADRSKLYLPLLLDHHLLSTPPTYAAQQ

SEQ ID NO: 279014 - protein, 52 aa, Glycine max
  unsure (1)..(52): unsure at all Xaa locations
  Clone ID: PAT_MRT3847_93973C.1.pep
IFIKYFLFNIYFFGGKNNXXRVEAITINNCNCHKNTRTTTTFVLYQTKANIY

SEQ ID NO: 279015 - protein, 82 aa, Glycine max
  Clone ID: PAT_MRT3847_93974C.1.pep
KLQLMLVAVQIDAAFLHEFQYQIIVSRVFQRIMQDCCIKRVFYKLNITYNTCINLQMRLFQEANPAKVTTNNKSLNWMKMKI

SEQ ID NO: 279016 - protein, 341 aa, Glycine max
  unsure (1)..(341): unsure at all Xaa locations
  Clone ID: PAT_MRT3847_93975C.1.pep
DLFDWXHFXNMLXNEVHIVEKLPPAYAGIEPFPKIYANPLPGCICETRVLPRLPRRLAVFCSHARAGLDSRGGPPAILFLPCRLEEIAMCWATPFGALGCPPVARRLQMAKPGPALRVXLAAGFKLXSSTDRPEYTTVNTIESKNRTXVSHWKEKPINGTVCLLLGXXTLTQYETHLLLVGLNKLYPYCTILVAGEAYGRGSMKYLEDDFPNIFSHSSLSSEEELNSFKNHQNMLAGIDYVVALKSDVFLYTYDGNMAKAVQGHRRFENFMKTINPDKMNFVKLVDQLDEGKISWKKFSSKVKKLHTDRIGAPYPRETGEFPKLEESFYANPLPGCICETR

SEQ ID NO: 279017 - protein, 64 aa, Glycine max
  Clone ID: PAT_MRT3847_93976C.1.pep
QANQHGQRFNNRPIGIVKESIEWQALYTLQTEFLSCLKKSFMPTYFCDQFTLNTILVFKKGLFE

SEQ ID NO: 279018 - protein, 85 aa, Glycine max
  Clone ID: PAT_MRT3847_93977C.1.pep
AFAFKAFRPFSLSFVFWIVTTSILLESLLSELGFVKGLGFPPWVVKIVWIPDLGSVLTPKRGTGGPAKARRNHKGPFPCLPLLVL

SEQ ID NO: 279019 - protein, 46 aa, Glycine max
  Clone ID: PAT_MRT3847_93978C.1.pep
KSQTTGKRHSKFKPMQVGRIKPRSKPKQQKLITVADDLPIMNDIAN

SEQ ID NO: 279020 - protein, 38 aa, Glycine max
  Clone ID: PAT_MRT3847_93979C.1.pep
LRKSYAHHVVNFVAKNELHVELIGLQAENNEIKCNERK

SEQ ID NO: 279021 - protein, 52 aa, Glycine max
  unsure (1)..(52): unsure at all Xaa locations
  Clone ID: PAT_MRT3847_9397C.1.pep
IVPPPLSPXLKLIISNYHFVSLNKYKDNLNFSFFLFKNNPIFFFLTDKYSSH

SEQ ID NO: 279022 - protein, 95 aa, Glycine max
  Clone ID: PAT_MRT3847_93980C.1.pep
VSARAGDGKKKEVASQSRVGFHEGSVGSAAAGGWGDNGGNSDNVSTSGSLPSREQSPVVLPRSRLQNGESSSEAAGITVTLCACVDFVMTLIVWC

SEQ ID NO: 279023 - protein, 59 aa, Glycine max
  Clone ID: PAT_MRT3847_93981C.1.pep
RRSILLLEMQMYLLGDTTSLGSTDTEESDYDSPLIATALRCFYTSVCITLSEMRSSVDL

SEQ ID NO: 279024 - protein, 284 aa, Glycine max
  Clone ID: PAT_MRT3847_93982C.1.pep
TRPGDLGQTDWTKSTLEHVKKSNYDMLLLPGDLSYADFNQDLWDSFGRLVEPLASQRPWMVTQGNHEVETIPLLHKTPFTAYNARWLMPFQESGSNSNLYYSFDVAGVHVIMLGSYTDFDPSSPQYKWLQNDLQTVNKRTTPWIVVLIHAPWYNSNTAHQGEPESINMKVAMEDLLYQARVDVVFAGHVHAYERFTRVYKDKANNCAPMYITIGDGGNREGLATKYMDPKPTISIFREASFGHGTLEVFNVSHARWTWHKNDNDEAVDSDFVWLTSFSSIPSCK

SEQ ID NO: 279025 - protein, 52 aa, Glycine max
  Clone ID: PAT_MRT3847_93983C.1.pep
IIRETEEVAITPINFKLELLWGPCDVCPPVFINTDDPAYIRWARWCFFFILS

SEQ ID NO: 279026 - protein, 40 aa, Glycine max
  Clone ID: PAT_MRT3847_93984C.1.pep
GTLSVAIVDLFLVALFTHSLFALFCVVLYSCAPICRHLAA

SEQ ID NO: 279027 - protein, 50 aa, Glycine max
  Clone ID: PAT_MRT3847_93985C.1.pep
SKELSIQSHSVKLMTAILYFNKVEEEVALTDCTPLLDVIFGTLLCYLLHA

SEQ ID NO: 279028 - protein, 63 aa, Glycine max
  unsure (1)..(63): unsure at all Xaa locations
  Clone ID: PAT_MRT3847_93986C.1.pep
VLRSTAXAAEQRLQVYICVGTGHHTRGSRTPARLPIAVQRYLLEEEGLDFTEPQPGLLRVVIY

SEQ ID NO: 279029 - protein, 272 aa, Glycine max
  Clone ID: PAT_MRT3847_93987C.1.pep
KIAADMLTKWNSYISSDKDMLMFKSGSSIPSRGSVDFASAVRKLASQDSGIWKYDKNGSGDASTGSSRGLNALASAYNGGQGRVNIGDRLQSRGSARAAPVWLETGDAVANMYSELREEARDHARLRNAYFEQARQAYLIGNKALAKELSVKGQLHNMHMKAAHGKAQESIYRQRNPVAPENGRGPQRMIDLHGLHVSEAIHVLKHELSVLRSTARAAEQRLQVYICVGTGHHTRGSRTPARLPIAVQRYLLEEEGLDFTEPQPGLLRVVIY

SEQ ID NO: 279030 - protein, 161 aa, Glycine max
  Clone ID: PAT_MRT3847_93988C.1.pep
LVLPTIFITISYWMGGLNPSLVTFVLTLLIMLFNVLVSQGIGLALGAILMDVKQATSLASVTMLVFLLAGGYYIQQMPAFIAWLKYISFSHYCYKLLVGVQYSVNEVYECGQGLHCRVRDFPAIKCLELEDTMWGDVAALTVMLIGYRVVAYLALRMGQPH

SEQ ID NO: 279031 - protein, 98 aa, Glycine max
  Clone ID: PAT_MRT3847_93989C.1.pep
RSRVRPRVRDPCLGGIQKYATPMMPLDEEILSKVAQDMVEEWFDCVDEEDSFVVVDPRAELNAKCGVGLYWMNSIRYIVGINFRGLTLVVCSWQVWYI

SEQ ID NO: 279032 - protein, 42 aa, Glycine max
  Clone ID: PAT_MRT3847_9398C.1.pep
LYFVFCRDRGAKVTHTCMQFNIGFILSPKYNRLRGVVLQDPC

SEQ ID NO: 279033 - protein, 84 aa, Glycine max
  Clone ID: PAT_MRT3847_93990C.1.pep
NEQSGHIRFHVGVIQTRGATRKKIARCLHACHLLLYCGRRKAAWVKPIIADRDKKAYHLNLSRDTIQLGVVMGLGGLWGELTYI

SEQ ID NO: 279034 - protein, 72 aa, Glycine max
  Clone ID: PAT_MRT3847_93991C.1.pep
SWNTLALNKARPKGLVHQLGLECAMHLVLHNPPPSKSCNNLPVGFSHDKWLVIGKLQFFFCFQYLIFYLWIR

SEQ ID NO: 279035 - protein, 153 aa, Glycine max
  unsure (1)..(153): unsure at all Xaa locations
  Clone ID: PAT_MRT3847_93992C.1.pep
GCCGKRRMGKLTFPQGTPRSGKRMPLSIGGGAGAQNAILMTMPNAGLSMWRHLVGDLAYXVDKMTPPYIKGTVSLLIAFGNLADDTINFEAFAHKQVQYGEIEEKVVSKSSQQEFLTHWATEVRPATTLLADGCAYLHAMVHDSSVCTIPRDS

SEQ ID NO: 279036 - protein, 68 aa, Glycine max
  Clone ID: PAT_MRT3847_93993C.1.pep
VNQSVECLWLLIVIKRCSFSLKETPAAPNGPSSAYKVQCCGKDKNVVQQCMRHARKNQIMQSYFHRQQ

SEQ ID NO: 279037 - protein, 58 aa, Glycine max
  Clone ID: PAT_MRT3847_93994C.1.pep
SLNQHMSQRPTIPQSCTIACGLQSHLVVTSEMIPSYQLVPLVTSFLHLIYPMLLIQTT

SEQ ID NO: 279038 - protein, 55 aa, Glycine max
  Clone ID: PAT_MRT3847_93995C.1.pep
PACGDSCYRVLSEAGSRGLFRIACPGLRLRYSTVKSSLARLLHEIEWIPSDERDS

SEQ ID NO: 279039 - protein, 56 aa, Glycine max
  Clone ID: PAT_MRT3847_93996C.1.pep
LVKRRGPLFEVSGACTRNMILHTMDLCSERDIYEGALNSRPWAIIRAQGVKAVMRS

SEQ ID NO: 279040 - protein, 50 aa, Glycine max
  unsure (1)..(50): unsure at all Xaa locations
  Clone ID: PAT_MRT3847_93997C.1.pep
NILWPAFYNKVSGKTLVLPSXIGVNHFPISPDGVIKKRPSPIALHNSCPP

SEQ ID NO: 279041 - protein, 166 aa, Glycine max
  unsure (1)..(166): unsure at all Xaa locations
  Clone ID: PAT_MRT3847_93998C.1.pep
YGCKKTTEGDVKAVMKDSGTAMXGVGVSSGKNRAXQAAQQATLTPLIGSSIQSATGVVYNITGGKDITLQEVNRVSQVVTSLADPSANIIFGAVVDDRYNGEIHVTIIATGFSQSFQKTLLTDPRAAKLLDRELGGQESKAVSPPLKSSNYPSTVASRASPRKFFF

SEQ ID NO: 279042 - protein, 85 aa, Glycine max
  unsure (1)..(85): unsure at all Xaa locations
  Clone ID: PAT_MRT3847_93999C.1.pep
NTKPLPQKRLFPGGGLFHPWGGAQNPKKKAPPXLAENKRARFPRGGLVGFTFQNAPPGKGPLPKGRPPLNSRLHPPFFEAFCSSF

SEQ ID NO: 279043 - protein, 181 aa, Glycine max
  unsure (1)..(181): unsure at all Xaa locations
  Clone ID: PAT_MRT3847_9399C.1.pep
VATHGCGQLLSGLNQESVGLNSSKNVDAQQLFRNWTTLDDSAMFDIGNSYIENGSLDNDNTFQEAVDFLEKAGFHSLTLPSLPPDDAPDKFHISCDNLKRENHRSCKRSSNKLTGDSEERREAVKYLCKNRSRRGALLKFVTPNKVLDKKRKNMDSLQCKKSXKKPSHTSVTPPVAAGSXR

SEQ ID NO: 279044 - protein, 235 aa, Glycine max
  Clone ID: PAT_MRT3847_939C.1.pep
ILNIVFPFLIPNTPFRIQTMASSSSLSLDTAKDLSNSSGEVHVIVGPMFAGKTTALLCRIESELNAAKNVVLLKSSKDTRYAIDSVVTHDGIKFPCRALPDLLSFREKHGDDAYQKLDVIGIDEAQFFEDLYEFCCKAADEDGKTVIVAGLDGDYLRRSFGSVLHIIPLADSVTKLTARCELCGKRAFFTLRKTEQRETELIGGADLYMPVCRLHYLNSQVAERSVLESQNFKTD

SEQ ID NO: 279045 - protein, 55 aa, Glycine max
  Clone ID: PAT_MRT3847_93C.1.pep
TKGCTSRRESKKNNHQAFIPEGLFVMIAAELTREESVEYCYRSSGDSNNQFRFSL

SEQ ID NO: 279046 - protein, 51 aa, Glycine max
  Clone ID: PAT_MRT3847_94000C.1.pep
KYNMTSTDKAQALKMELLLLIQSAPMCSFSHVQGTRTIGSHRIMIAFLYSA

SEQ ID NO: 279047 - protein, 47 aa, Glycine max
  Clone ID: PAT_MRT3847_94001C.1.pep
YPAQGYPPPYAPQYAQPPPRQQNSTGPGCLEGCLAALCCCCLLDACF

SEQ ID NO: 279048 - protein, 49 aa, Glycine max
  Clone ID: PAT_MRT3847_94002C.1.pep
FVIYIMPHIFLSCQNRNSINLLKCKIETWYTEIVLSVPIGSFSSTEDGL

SEQ ID NO: 279049 - protein, 50 aa, Glycine max
  Clone ID: PAT_MRT3847_94003C.1.pep
PTHSCTEDAFLTDDGLPLKTFLERAHCTSVVHCRMRIHPSILQQTSKHVL

SEQ ID NO: 279050 - protein, 182 aa, Glycine max
  Clone ID: PAT_MRT3847_94004C.1.pep
MSLHPNPSLTPPPATPALKPWLNTTATTEPLNPMVLAMHLSDPKSKTLIPNSTLIIMDRTLLLSDELLLRILSKLPNSQQQRNSNSLVCKRWLNLQGRLVRTLRVLDWNFVLSGRLIIRFPNLNHVDLVPGSFTSSVYSSIVVSHRLVSMHVDSAWRNRVEKNPCTVETVDARLKSLAGGVP

SEQ ID NO: 279051 - protein, 246 aa, Glycine max
  Clone ID: PAT_MRT3847_94005C.1.pep
MKFLFAVLAIFVVALPCAWTKLELDAGPSFNVIDYGATGNGQTDDSQAFLKAWKDACNASYGTATLLIPKEKTFMLQPVLFRGPCKPPTVHIKLKGTIIAPNKIEAWKLPKSTRMAWIRFRHISGLVIRGGGWGLIDGQGSPWWNSYFNTEIKRPTALHFRECDYLFLSGLTHINSPKNHISINRCNNSLISKIHMIAPDESPNTDGIDISQSSNIVIKNSKMETGDDCIAINHGSTFISIIGVFC

SEQ ID NO: 279052 - protein, 49 aa, Glycine max
  Clone ID: PAT_MRT3847_94006C.1.pep
FYFITKTMKTFLMLNGDREYIIFCQHTWHYPKLLTMLAHITELTYNLKP

SEQ ID NO: 279053 - protein, 211 aa, Glycine max
  Clone ID: PAT_MRT3847_94007C.1.pep
MLHSQCHHHLLFPLTLAHHKVKPPLSILPPLHHKPTILHSVSASAIPPWAAQLADAAADIDTEGPVELPFSSTPSIFATSDDPSPIQVASSVLLTGAVSVFLFRSLRRRAQRVKQSQFRSSGEKSIKEDALDSLKAMGSASVKAKEDSASPVQALLGGISAGVIALILYKFATTIEAALNRQTISDNFSVCLISCPSISVFILFCCTTCYL

SEQ ID NO: 279054 - protein, 46 aa, Glycine max
  Clone ID: PAT_MRT3847_94008C.1.pep
PSEPLNRLIQHILHRKEEKYDTVKSYLIHIHTTMLNTTLKWDKKKE

SEQ ID NO: 279055 - protein, 105 aa, Glycine max
  unsure (1)..(105): unsure at all Xaa locations
  Clone ID: PAT_MRT3847_94009C.1.pep
TTQIKCGLRELKTRMDSGKNTQKITGALKLGAAAKGGRAQEAVVNGRPFXKTLVEVFYNINGQFLTGDVNILLTKVRPVKKVVFVGVTGNXGFLGGVKNGFLKKV

SEQ ID NO: 279056 - protein, 143 aa, Glycine max
  unsure (1)..(143): unsure at all Xaa locations
  Clone ID: PAT_MRT3847_9400C.1.pep
ASKQELGGGRPFFSCFFFFFFFFFLPSLSPPFLGFSPPPLLPLGGCSLFPPPXPSPFLGPESPYGGGNLPPSGFGGFIGWDLPELVVLAXPPLPPDPPVCVFSHDPQGRFSTKFFPVPPCLKLCFPALLALGCSLPPPPPPSS

SEQ ID NO: 279057 - protein, 120 aa, Glycine max
  unsure (1)..(120): unsure at all Xaa locations
  Clone ID: PAT_MRT3847_94010C.1.pep
MAKISILLVGLWLLGSWTGLLDAEYMKYKDTKESIDTRVEDLVSRMTLEEKIGQMLQIERKYASADLVKKYFIGSVMSEGGXSVPAPQASAETWIDMVNEFQKGAXSTRLGIPMFYGIDA

SEQ ID NO: 279058 - protein, 253 aa, Glycine max
  unsure (1)..(253): unsure at all Xaa locations
  Clone ID: PAT_MRT3847_94011C.1.pep
MHLSYVQSGLKFLWTLTFTYSVEFVSGPSMDLEGMAKISILLVGLWLLVNWSGLLDAKYMKYKNPKLSIDTRVEDLVKRMTLEEKIGQMLQVERKYVPADLLKKYFIGSVLSEGGSIPAPQASAETWIDMVNEFQKGALSTRLGIPMFYGIDAVHGHNTIHNATIFPHNIGLGATRDPELVKRIGAATALEVRATGIQYVYSPCIAVCRDPRWGRXMKASVEDPELVQAMTEIXPGLQXGHPYDSPKGVPFIT

SEQ ID NO: 279059 - protein, 107 aa, Glycine max
  unsure (1)..(107): unsure at all Xaa locations
  Clone ID: PAT_MRT3847_94012C.1.pep
AALAISKSYPIVTIVAAQNAHAASKGPDHNRATNXSARLASQHKMLNLAMMPTTTIXSFPQTVXLTTVRPELHADTTFEDECVTSIDAEIHKGVELXEQLDIDVLVM

SEQ ID NO: 279060 - protein, 156 aa, Glycine max
  Clone ID: PAT_MRT3847_94013C.1.pep
TLKCRRRREREREPDSGAPPPPLARSRPHTRTRHLGHFILTPSSISHTRSHPFPSSTLATISLPPAARITGYTHLWCSNYTTVGTIEEGSEKCYLNLSDEELMRQCEMDTFKASAPGGQHRNKRESAVRLTHLPTRIIAHASEERSQHKNRASAIN

SEQ ID NO: 279061 - protein, 75 aa, Glycine max
  unsure (1)..(75): unsure at all Xaa locations
  Clone ID: PAT_MRT3847_94014C.1.pep
RLPLXLXPTPTXLLCSLLSSPAAYAXVXSSXYRLXVRPPLXLALRHXXLLRXPIRIVVLYLRXPLXWXSTSXXXD

SEQ ID NO: 279062 - protein, 37 aa, Glycine max
  Clone ID: PAT_MRT3847_94015C.1.pep
TAARRRQKGMCPCNTLYYHLDLFIKLGQVEYNVFVFF

SEQ ID NO: 279063 - protein, 86 aa, Glycine max
  unsure (1)..(86): unsure at all Xaa locations
  Clone ID: PAT_MRT3847_94016C.1.pep
DYYPFWELIFPIEVCGPNNGXEMWSSEWANQTSWHSSFLIDNPKQSTXFDVLREYLRFEIAGXTLMPAFSVPQATARASENAESSA

SEQ ID NO: 279064 - protein, 51 aa, Glycine max
  Clone ID: PAT_MRT3847_94017C.1.pep
HPQVKQWCSIHEVQLRQLGRQQGQSLESRPNVQQPREPRQNHINWFYKSSG

SEQ ID NO: 279065 - protein, 97 aa, Glycine max
  Clone ID: PAT_MRT3847_94018C.1.pep
AEYEEFETRIIEVDSAARTYLHEKTTAEQMLLPGMPSRSYKMAVLSSISQPCGTRYTRCHQTFFHSTHRQMLKKLQKGCLFEDPPNLWDELPPRALI

SEQ ID NO: 279066 - protein, 94 aa, Glycine max
  Clone ID: PAT_MRT3847_94019C.1.pep
QYPNGYIMDEQGDYIAIKGAHPKLLKGDLPTTANIRGLTNTRDSKGFARKRGALITLTVCLGRNTVKHIGNFGIHQNVRGGTPTTALRSGRTLL

SEQ ID NO: 279067 - protein, 159 aa, Glycine max
  Clone ID: PAT_MRT3847_9401C.1.pep
MSGNSSNNNNISKRISVLSSHFARSSPIMASEKQAALAVTPSDADAPTIFDKIINKEIPSTVVYEDDKVLAFRDITPQAPTHILIIPKFKDGLSGLSKAEERHFEILGRLLYTAKLVAKQEGLDDGFRIVINDGPKGCQSVYHIHVHLLGGRQMNWPPG

SEQ ID NO: 279068 - protein, 54 aa, Glycine max
  unsure (1)..(54): unsure at all Xaa locations
  Clone ID: PAT_MRT3847_94020C.1.pep
TDXFNSSSYQTEIVFNTIVRXXXXSTLSLXPGXHICFTSACNYTCYLYPKISGA

SEQ ID NO: 279069 - protein, 60 aa, Glycine max
  Clone ID: PAT_MRT3847_94021C.1.pep
NSRGVERTTNKTTNNSNSYMNIFSSLPGKILNRNPPRNSDLIFFGFRIGLIRKQIIPIHI

SEQ ID NO: 279070 - protein, 57 aa, Glycine max
  Clone ID: PAT_MRT3847_94022C.1.pep
AMESLMSELKVSNEDQFTCDMVIQQLIHCGYNLYFRFSTIVMMMSCTNFLVTDATWI

SEQ ID NO: 279071 - protein, 92 aa, Glycine max
  unsure (1)..(92): unsure at all Xaa locations
  Clone ID: PAT_MRT3847_94023C.1.pep
HIFTTSSMEDWAGLSXVEYDAXKHLIAAEVSSILQSSLFPGLRSSIDFMVXGIPKIHRRXLARDEGPYGPMGRRIPEGLLGMAFCNTGLDGR

SEQ ID NO: 279072 - protein, 46 aa, Glycine max
  Clone ID: PAT_MRT3847_94024C.1.pep
TILNLSRRVSLLLSILYWTEISILTHLSVMHACHHMAPSTFTTEED

SEQ ID NO: 279073 - protein, 46 aa, Glycine max
  Clone ID: PAT_MRT3847_94025C.1.pep
STGLLRCGKSCRLRWINYLRPDIKRGNFTREEEDTIISLHEMLGNR

SEQ ID NO: 279074 - protein, 158 aa, Glycine max
  unsure (1)..(158): unsure at all Xaa locations
  Clone ID: PAT_MRT3847_94026C.1.pep
GVRGAQELPSEGAKGNSENQQKGDQQPISTANKACGKNAKLGSQASDPXGGGVHVRARRGQATNSHSLAERVRREKISERMKFLQDLVPGCSKVTGKAVMLDEIINYVQSLQRQVEFLSMKLATVNPRLDFNIEGLLAKDILQQRPGPSTGLGFPLEY

SEQ ID NO: 279075 - protein, 66 aa, Glycine max
  Clone ID: PAT_MRT3847_94027C.1.pep
LYLTNCSDGAWHYTVRLYLDSNFCQLIPFLIDTSILYTIKSSLPFGNGASLDISHMHDALIRANPA

SEQ ID NO: 279076 - protein, 101 aa, Glycine max
  unsure (1)..(101): unsure at all Xaa locations
  Clone ID: PAT_MRT3847_94028C.1.pep
XXXPXXXXXXXXXXXXXXXXXXXXXXXXXXXXXXXXXXXXXXVXCXVXPPXXTLXTXNTKXXXXXTRHTXTXXXTAPHXXQNQXXPHXAXEPNXXHHXXXX

SEQ ID NO: 279077 - protein, 55 aa, Glycine max
  Clone ID: PAT_MRT3847_94029C.1.pep
NSHTHWPFLYMASIFLILSVKNLGQSPRCHRYTPELNGERLLVGANLVSAGLESS

SEQ ID NO: 279078 - protein, 87 aa, Glycine max
  Clone ID: PAT_MRT3847_9402C.1.pep
GNSFYFKVVAKVGKKIKIANPFGLNGALVLREGVDPSGRKGKEKAFSQLCTQYPGYCQWYQSLFTTTGLVSNADIYTLAYQSVLIFW

SEQ ID NO: 279079 - protein, 70 aa, Glycine max
  Clone ID: PAT_MRT3847_94030C.1.pep
CMSNGCESCGYDPHLIPHPLLFLSLHPQITPIRNALSTIPLSLQTQQINNKTKLISLSGYSRSPNSRKIN

SEQ ID NO: 279080 - protein, 62 aa, Glycine max
  unsure (1)..(62): unsure at all Xaa locations
  Clone ID: PAT_MRT3847_94031C.1.pep
LPTLQFFLFDTDXNKWGFYIKQDVCAYIIQPSILSPTFPQNISLSNYNFHTWQLIKLFLNYI

SEQ ID NO: 279081 - protein, 95 aa, Glycine max
  Clone ID: PAT_MRT3847_94032C.1.pep
LNTNLLVSERKTETLLLVVATSKERKERKRENLHSIFFCSFSVYAFIVSLSLTLESALHHTPQQRSSAFPFPSLFTPFFFLSWSLSLSLSLSLSL

SEQ ID NO: 279082 - protein, 551 aa, Glycine max
  unsure (1)..(551): unsure at all Xaa locations
  Clone ID: PAT_MRT3847_94033C.1.pep
MRYGGGKRRSLSLKPLFVLCVVVTGLGLLVLSLRPLDAPASSTVPLSRASSSEFNTFSNNGSRVESILAVRHVGERPCKTVEEMGEDFGGGVXQESPRVRRIIQNHFLANGASRVRDFPPEQFCRHGFVLGKASEAGFGNEMYKVLTAAALSIMLNRSLIISQTRGKYPFGDYISYSNFTFTVKEIKHLWRHKGCESKYGRKLVMRIDDFMKPVETNVICSNWKKWKQPIIWFQGTVDSVAAQFFLKNMHSQMRTAALNLFGDPQVLGLRPNVFGELMRVLISPSEDVEAAVNWVIGGGENPDISLHILMLMHRSGRAVQAVLHCLNKAMRSQHLMSSRPKVVVVSDTPAVVKSIMYMSNLSEFVEVLHFDYDKYRGSMFKGLHITDSRRRDWGTAPRWVAFVDFFLASRAKYATISGAHRRVGTTYAQLVAALSAAYNLGDMSGSRFIFLSSFQSNLLTDGLKNQRGWGHVWNRYAGPLSCRKQGNQCAFTPVLPSAWWDGLWQSPIPRDINRLASYGIKLSALGTVDKNSLKNHCKKKKNVVRTFTFKL

SEQ ID NO: 279083 - protein, 53 aa, Glycine max
  Clone ID: PAT_MRT3847_94034C.1.pep
VTQSKHDYILKNIDTTLTWVIWHYNFDTVTTLTTILTCIYYNHITLPPLAFSP

SEQ ID NO: 279084 - protein, 71 aa, Glycine max
  Clone ID: PAT_MRT3847_94035C.1.pep
PAPVPPLSSSSSGRALRPQPSLLRPSQTVMEVHLPLPSSSHDDGFSLSHDQPCISSHDHALLSSSNAHKSA

SEQ ID NO: 279085 - protein, 105 aa, Glycine max
  Clone ID: PAT_MRT3847_94036C.1.pep
IFSLYNRPGETPHAAFMPSPPGHGFFNAGAGQFFSMRFPGMVPTPPQPAAMGSPPPFGPPALGNNVGVGGAATAPGGQGGAYQQPPLGPLHWATNFLNGVPKKKK

SEQ ID NO: 279086 - protein, 75 aa, Glycine max
  unsure (1)..(75): unsure at all Xaa locations
  Clone ID: PAT_MRT3847_94037C.1.pep
MVQRLTYRRRQSYATXKSNQHRVVRTPGGKRGYQSTTERASGPKCPVAGKRIQXIPHLRATEYKRSRLPKNRRTV

SEQ ID NO: 279087 - protein, 103 aa, Glycine max
  Clone ID: PAT_MRT3847_94038C.1.pep
PRAKWLWQKGGQSHHQLSHVWLKQCISGGRNVRYQLRQSFVLDSCQHHKVTAWASATLVDRLHSRQGTAQHRPDKAPERPIRYLKGMGSKTTKSFAFTQPPFN

SEQ ID NO: 279088 - protein, 99 aa, Glycine max
  Clone ID: PAT_MRT3847_94039C.1.pep
NSARDCPSTGGDSNLAPLDTTSPNTFDNAYFKNLQSKKGLLHSDQELFNGGSTDSQVNSYSSNPASFQTDFANAMIKMGNLSPLTGSSGQIRTNCRKTN

SEQ ID NO: 279089 - protein, 82 aa, Glycine max
  Clone ID: PAT_MRT3847_9403C.1.pep
GKENIFSFMILILFTYLFILSSANRILIFLVQEEYHRINSVKLVPCSNGTIPLIPFLPLGIILKVSWPHYSPFGLFHILHLC

SEQ ID NO: 279090 - protein, 316 aa, Glycine max
  unsure (1)..(316): unsure at all Xaa locations
  Clone ID: PAT_MRT3847_94040C.1.pep
MILPNIKVRFFLLFCLIGIVSAQLSSTFYGKTCPNALSTIKSEVVSAVNNERRMGASLLRLHFHDCFVQGCDASVLLDDTSSFKGEKTAGPNAGSIRGFNVIDTIKSKVESLCPGVVSCADILAVAARDSVVALGGPTWTVQLGRRDSTTASLSSANSDLPAPTSSLSALISSFSNKGFSSKELVALSGSHTIGQAQCSSFRTRIYNDTNIDSSFAKSLQGKLPXTGGGSTLAPLDTTSPNTFDNAYFKNLQSKKGLLHSDQELFNGGSTDSQVNSYSSNPASFKTDFANAMIKMGNLSPLTGSSGQIRTNCRKTN

SEQ ID NO: 279091 - protein, 179 aa, Glycine max
  Clone ID: PAT_MRT3847_94041C.1.pep
KNFKLFSGKMTFFSKYHLQIKSKTWNKDSYGLYDYETRNHHTQNLIITRPSKIIRSQNEISHYNTPIAMEAVARKNTGVILEFESPKSLASITDGPNGIQITPEMKDDGISPESFWHVLDRDDSTNGYALKVNDVIKLGRVMFKINQIKLSQDRQMQSPNPYESSLADSIRNHMQKAGL

SEQ ID NO: 279092 - protein, 72 aa, Glycine max
  Clone ID: PAT_MRT3847_94042C.1.pep
KGTLRSTFISERMQKLQITLYSYKYINLKKYIYTERDRERGTGNYRPKPLDTTLNVRPHKSRDTGKGRDLRK

SEQ ID NO: 279093 - protein, 79 aa, Glycine max
  Clone ID: PAT_MRT3847_94043C.1.pep
AILVLIELILWMYPLICSLEERALVNNNPATPVKDYTLGSLMHCMINTSFCILYKHERSDLTALHTDEMFLANARSYVL

SEQ ID NO: 279094 - protein, 77 aa, Glycine max
  Clone ID: PAT_MRT3847_94044C.1.pep
LTFGAMTGGRTLQPVTKAIDTSFQESINFCLLSGGRILKGKKVTLCAGHRLRELYSLTLLVYLLNTLLFDIETWSHI

SEQ ID NO: 279095 - protein, 112 aa, Glycine max
  Clone ID: PAT_MRT3847_94045C.1.pep
FWSGRFKNFNCPNRSPTTPDNALILILNEGAFLTVKSLPPPTNQGLFESLNFLPNIKKFPFKRDFFKVKGPFRSCFLKRLAPNVNPLYQYHSFYLPTIPGPLPFLGFFLGDH

SEQ ID NO: 279096 - protein, 84 aa, Glycine max
  unsure (1)..(84): unsure at all Xaa locations
  Clone ID: PAT_MRT3847_94046C.1.pep
LTNAQLLSVGSWCRLRTRRSLQAAATGSYLXXNLPLXSAFLSFALAQFXKIFTSWYKEKRWDSKRLLXSXGMPSXHSAXXSGSG

SEQ ID NO: 279097 - protein, 67 aa, Glycine max
  Clone ID: PAT_MRT3847_94047C.1.pep
TFIMLTYGLSVDCNEIETCLQCMLFKLSNHITPECAGLYAVILNLVTKIEQSHHLGFDHSPRGGWHQ

SEQ ID NO: 279098 - protein, 282 aa, Glycine max
  unsure (1)..(282): unsure at all Xaa locations
  Clone ID: PAT_MRT3847_94048C.1.pep
VCQPKDKGVXSIKDLKTFNSALLAKWCWDLFHKQEEPWAKILISKYGGWRALEEGIRGSQDSIWWRDLLSSQQQQQNQVVKRERNWKVGGGEKFRFWEDPWTHNVIPLMDKYPRLYRISDQQKQIIMNMGNNTNSGWEWKLSWRKALFDSEIQMADDFLGELSQQQIQPNREDRWSWKHDQSGYYSTKSGYDLIWEAQMGANQNLDFVDIWKLXIPSKSLVFAWRLIRDRLPNRMNLRRRQVMINEVQCPFCGDVEEEAAHLDGRCXKILPLWVGVFILGWI

SEQ ID NO: 279099 - protein, 55 aa, Glycine max
  Clone ID: PAT_MRT3847_94049C.1.pep
LSFVTLLSNQINPEVFFLTIKELYIPSIILRELVKKKKRLNEKDFIHSVISWWDH

SEQ ID NO: 279100 - protein, 110 aa, Glycine max
  unsure (1)..(110): unsure at all Xaa locations
  Clone ID: PAT_MRT3847_9404C.1.pep
TPGVLTPSMGDRETLQTTCEDVVAXRKTGGIFDGSMRLSGYPKKQETFDRISGYCEQNDMHSPHDTDYECLLYSAWLRYXSSVENKTRKVFIEXFMKLLGLGPLRNSLVG

SEQ ID NO: 279101 - protein, 74 aa, Glycine max
  unsure (1)..(74): unsure at all Xaa locations
  Clone ID: PAT_MRT3847_94050C.1.pep
NPQLLSLLIIYHSRGGFKTXLCLFIFTHLLKELPPYSRIRPPLITHISVKSTLHLYILKLHLPQSFTIHFPNLK

SEQ ID NO: 279102 - protein, 70 aa, Glycine max
  unsure (1)..(70): unsure at all Xaa locations
  Clone ID: PAT_MRT3847_94051C.1.pep
MGKEKTHINIVGIVQDNSGMAPTTGHXYYMLVGIDKRVTERFQKEAAAMHTRSFKNAMLLDKLTAERARG

SEQ ID NO: 279103 - protein, 187 aa, Glycine max
  Clone ID: PAT_MRT3847_94052C.1.pep
RKLSLSTLPEKGRSLLATGVLCPRLSRRFSPSSPPGPRRSRLPAWVGVPGEVIISQEPYVCVPNNSSVSPQKRCDGCFTTINNNVLSRCSRCQLAFYCGTACQRSEWKLHRLECEVLSSLHKYKRKSLTPSIRLMLRLYLRRKLQNDKIIPSTAMDNYNLVEALVAHMSDITEEQLVLYAQMANLVN

SEQ ID NO: 279104 - protein, 59 aa, Glycine max
  Clone ID: PAT_MRT3847_94053C.1.pep
AHAIDQKRNWKIHNFFFLCFVYQNKKKKGFGCCHVGFYRPITHESAHAACPRCPTYAVT

SEQ ID NO: 279105 - protein, 55 aa, Glycine max
  Clone ID: PAT_MRT3847_94054C.1.pep
NDRGSNSKIEEYASSPVKDPDFIMPLAEAVVHSLNSQSYKQVGLNLSLGLPEPHH

SEQ ID NO: 279106 - protein, 186 aa, Glycine max
  unsure (1)..(186): unsure at all Xaa locations
  Clone ID: PAT_MRT3847_94055C.1.pep
ARGLVVVYSGTIDQFKARLVAKSYTQVYGQDYTGTFSPVAKMAYVHLLWSMAVVCHWPLFXLDAKNAFLHGYLEEEVYMEQPLGFVAQGESSNMVCQLCRSFYGLKQSPRAWPFLYCGAAIWYDSHEADHSVFYCHSPQGCIYLIVYVDDIGITGSDQHGITXIEVXLCCQFQTKDLGKLRYFLGI

SEQ ID NO: 279107 - protein, 53 aa, Glycine max
  Clone ID: PAT_MRT3847_94056C.1.pep
AVPKKHGAPKKFKIPGALPPGIQPNWGITHRLKTPPKGGGQKAGGSPSEIWKP

SEQ ID NO: 279108 - protein, 109 aa, Glycine max
  unsure (1)..(109): unsure at all Xaa locations
  Clone ID: PAT_MRT3847_94057C.1.pep
IGLVADHGVRESLIRRFSDNGLNXYLVYXNTVESMTWIISKTRSTYGLLRGCNDLYQYEKKESEKAYSACYYACIEIVYECYEDITSSCYRXSVVLFGRLYYEKDGLPA

SEQ ID NO: 279109 - protein, 82 aa, Glycine max
  Clone ID: PAT_MRT3847_94058C.1.pep
APNFPVFPFYKRKGWGENPPAPFNFGVLPTEKKFWSVNVKGPPIGPPPRGVAPKGPSKGPFLNKKSSWLFSPPFFFFPPNPN

SEQ ID NO: 279110 - protein, 69 aa, Glycine max
  Clone ID: PAT_MRT3847_94059C.1.pep
QPLIQCMILLSPNCLPCLYAVVPLPRMGGCLLQGALPQLCAVPAHSHSRYQSTRRDWISSALSNNKCAV

SEQ ID NO: 279111 - protein, 54 aa, Glycine max
  Clone ID: PAT_MRT3847_9405C.1.pep
IIKWFFIQYKLNPFFKIGLFYYYKVKLLSVIHDLFLIKALDYYYFHTSLMGNVF

SEQ ID NO: 279112 - protein, 47 aa, Glycine max
  Clone ID: PAT_MRT3847_94060C.1.pep
LYIHTPTHTQICIILYKKIQSPLPHTLKNTSIHYITILHPFFFNKLV

SEQ ID NO: 279113 - protein, 217 aa, Glycine max
  Clone ID: PAT_MRT3847_94061C.1.pep
MVFIESMLKEVPPVTKLLCGSSILIHFLCYIDVINQYDVFFNLGLIFSKGQFWRLYTNLFHFGDEGMFVFFQLMMLYRCSKRLEEHTFRNKTADYIYFLLVGIVLMTCYGAVAGFPTHSRSFLTMLLYIWSRYNQNVVLLVFGFVPMKAPYITWFFVLFDILIGKSIAADILGIVLGHAFYFFHDVFPQLPLSKGKQLLKTPAFFEKMVNMMNIKPK

SEQ ID NO: 279114 - protein, 94 aa, Glycine max
  Clone ID: PAT_MRT3847_94062C.1.pep
GSRALDLTSSTLAAIAFSSTSCVFTRLDSGPLWCLWSPLLYRCDERLQRFHGVERSALLTSEICYDCYERTLPTLDPRTGEAIAHVAEGHSEDV

SEQ ID NO: 279115 - protein, 68 aa, Glycine max
  Clone ID: PAT_MRT3847_94063C.1.pep
MKEFPSCFGENGVRVVDSSYSSTTRGAQNAVTCVYQCKLGGRSCLITVSWTKNLMGQGLSVGIDELGN

SEQ ID NO: 279116 - protein, 48 aa, Glycine max
  Clone ID: PAT_MRT3847_94064C.1.pep
NVTTNPPLQETLLYSSFPLFMLDTSSLDHGTTTVYTTNNVLAELFQDS

SEQ ID NO: 279117 - protein, 105 aa, Glycine max
  Clone ID: PAT_MRT3847_94065C.1.pep
LGTMFEGEFQFTQLYFSHLYLIPNFGLIGELISNGQRLLVLEFMSIGYDTSTVEQLHWSTQLYDEEFKDLKDCNLYCEETHGPVPPRLRDGKSDLDALRFDNQPN

SEQ ID NO: 279118 - protein, 42 aa, Glycine max
  Clone ID: PAT_MRT3847_94066C.1.pep
EDRPASSLGGCLMNYCLDKTQKRNLHCALVHSLREIIRDGIF

SEQ ID NO: 279119 - protein, 84 aa, Glycine max
  Clone ID: PAT_MRT3847_94067C.1.pep
GLVVAVEAVSDALETLKDGAVSGAEYWSSWLLYGVGAEADVKTIGVAGSPRFEVYGSDFGWGRPKKVEMVSIEKTAVFGLSDSR

SEQ ID NO: 279120 - protein, 80 aa, Glycine max
  unsure (1)..(80): unsure at all Xaa locations
  Clone ID: PAT_MRT3847_94068C.1.pep
MTSCEGNCTCGSTCKXAERNSSGCTMYPNLSYTESTTTRTLAIQAAPGYAQFESAETGVPAENDGCKSGANCTCKPCTCK

SEQ ID NO: 279121 - protein, 42 aa, Glycine max
  Clone ID: PAT_MRT3847_94069C.1.pep
IKYHWPKGTASLTVQSPQKPSRPCWVWGGPPIFMAPEPHLCL

SEQ ID NO: 279122 - protein, 140 aa, Glycine max
  unsure (1)..(140): unsure at all Xaa locations
  Clone ID: PAT_MRT3847_9406C.1.pep
VTLIQNXSPISNLLRVAAWKKGCXMVKIVMSGNASDKRSVWASLVQVFLTNSSSTEHLDACQCTKSEPHSWELIFPIEVCGPNNGLETWSSEWANQTPWHLSLLIDHPKQTTVLDILLGLSQECEIAGNTIMPAFSVPQA

SEQ ID NO: 279123 - protein, 118 aa, Glycine max
  Clone ID: PAT_MRT3847_94070C.1.pep
QCLLWLCHCTTPVVQRGILYDSHSVDTLSDIRRKSCKDVRCQDVCSSALVRAESPLCRCHRTHTRRCECTARRRAPCGACTESAVSPQGSVSHHTEIITSLLIIMIMMLVVCSSPASL

SEQ ID NO: 279124 - protein, 33 aa, Glycine max
  Clone ID: PAT_MRT3847_94071C.1.pep
NNPKLKIKHCYLTIHHPINCKTKCLFYITKECH

SEQ ID NO: 279125 - protein, 141 aa, Glycine max
  unsure (1)..(141): unsure at all Xaa locations
  Clone ID: PAT_MRT3847_94072C.1.pep
ALFCLVMAGCVLSTLGPARXSLAIYEDLRRAVWPNAPIPPSLRDLPKPAPASVEIDDLPMQIEETQCPQTFFYXENLRPCKTMKVQFTTPPFLPPWGAVAWFKEIEDTAQERYRFEELCVKKDAIDGEERSRAESLGTVIG

SEQ ID NO: 279126 - protein, 71 aa, Glycine max
  Clone ID: PAT_MRT3847_94073C.1.pep
LRKRKKYYMPYGLTVAFLIYTNLISSFLVENYKNYIPLISIFNRHFVFPGPTCLSQQPPPTESVAWCHQNL

SEQ ID NO: 279127 - protein, 403 aa, Glycine max
  Clone ID: PAT_MRT3847_94074C.1.pep
GQELAAKVADFLRPGATLKHAKEGTESSAFWSALGGKQSYTSKKVVNEVVRDPHLFTLSFNKGKFNVEEVYNFSQDDLLPEDILILDTHAEVFIWIGHSVEPKEKRNAFEIGQKYIDLVASLEGLSPHVPLYKVTEGNEPCFFTTYFSWDHAKAMVMGNSFQKKVSLLFGFGHAVEEKSNGSSPGGPRQRAEALAALSNAFGSSSEKASGLAQDRLNGLGQGGPRQRAEALAALNSAFNSSSGTKTFTPRPSGRGQGSQRAAAVAALSQVLMAEKKKSPDGSPVASRSPITEGSATETKSDSSEVEEVAEAKETEELPPETGSNGDLEPKQENVEEGNDGQRMFSYEQLKTKSGHNVPGIDLKRREAYLSEDEFNTVFGMAKEAFYKLPRWKQDMLKKKYELF

SEQ ID NO: 279128 - protein, 79 aa, Glycine max
  Clone ID: PAT_MRT3847_94075C.1.pep
LVGYSLRTNFIQGHATGSGQNYILIVNDILNLTFNLADTYCYIHAIAFESLIGKERLTAWALDQDIECMLLLIFRNSLS

SEQ ID NO: 279129 - protein, 91 aa, Glycine max
  Clone ID: PAT_MRT3847_94076C.1.pep
RVPGCHSCKLVLTCKVSRTKGSPSVPGGRRKRRQRDRRWRKRRTAEMIRRKSTGVKMKDAISKKEWLVLCVYTNVMLCCMEYYIEGGREGD

SEQ ID NO: 279130 - protein, 74 aa, Glycine max
  unsure (1)..(74): unsure at all Xaa locations
  Clone ID: PAT_MRT3847_94077C.1.pep
VXXXFXRITIYTGNXXXXXXPXXXXTHXXXXXXPSSXXPEXIPXXTXSXXGGXXFFFFLTQNSSRIPSLRTXXR

SEQ ID NO: 279131 - protein, 259 aa, Glycine max
  Clone ID: PAT_MRT3847_94078C.1.pep
MDRIKGPWSPEEDEALRRLVQTYGPRNWSVISKSIPGRSGKSCRLRWCNQLSPEVERRPFTAEEDEAILKAHARFGNKWATIARFLNGRTDNAIKNHWNSTLKRKCSEPLSEPRPLKRSATVSGSQSGSDLSDSGLPIILARSVSVTVAPSNHLAETASSSVTDPATLLSLSLPGFDSCDGANNGPGPNQGPSCGPFQEIPMLGSQKQLFSQEFMKVMQEMIRVEVRNYMSVLERNGVCMQTDAIRNSVLERMGIGRVE

SEQ ID NO: 279132 - protein, 138 aa, Glycine max
  Clone ID: PAT_MRT3847_94079C.1.pep
VVSGTPNDQSDDGKNGDNQTISKMKLAHIEKRPTRVPRPPPRPSGGAAVTATANPSNGVPSAPPPPPPPPGAPPPPPPPPGGPPPPPPPPGSLSRGGMDGDKVHRAPQLVEFYQTLMKREAKKDPSSLLVTSASNAFD

SEQ ID NO: 279133 - protein, 154 aa, Glycine max
  unsure (1)..(154): unsure at all Xaa locations
  Clone ID: PAT_MRT3847_9407C.1.pep
PLVRANKLAKIMNLRHSVVGDLKLPTDGKMYEGKHIPESNIRAGENHVVQIPLMAHEEILSSSASDLKTAMVSKNSKPXATAMHVGAIQIIIDSFASPDCDIKGAMLLVDTYHTNXKMQFRSIFVAPLRGGRSIEVASFSNTFVQIEPHVNSTF

SEQ ID NO: 279134 - protein, 232 aa, Glycine max
  Clone ID: PAT_MRT3847_94080C.1.pep
PTRPVSPTDSVLTTTKKMLELRASSAVVTVGDKLCGILTSKDILMRVIAQSLPPSSTLVEKVMTPNPECGTIDTPIIDALHTMHDGNFLHLLVVNRDGIVVATVDAIHITHAAVATASQVGNTPNFNSEAANSMIQKIWDSAMALAPNEEEEDSQSETSLKMISEGGETGRSISYLASSMQNAFSFKLQDRKGRLHRFTCDTSSLAEVITSVIQRVGDDIDPMDLPQILYED

SEQ ID NO: 279135 - protein, 68 aa, Glycine max
  unsure (1)..(68): unsure at all Xaa locations
  Clone ID: PAT_MRT3847_94081C.1.pep
VFGSPFHNPQKRKRNNLFKLATXNSNQLAKKKLKKEYFLPSLESKPSSFFNKKLFCYFVPHPFFLLLF

SEQ ID NO: 279136 - protein, 271 aa, Glycine max
  Clone ID: PAT_MRT3847_94082C.1.pep
PRPNFYVKLQRLDLSQNNFSGSFPDEVGTLQHLEILKLSDNKLSGYIPAALGNLSHLNWLLMDGNYFFGEIPPHLGSLATLQIAMDLSYNNLSGRIPVQLGNLNMLEFLYLNNNHLDGEIPSTFEELSSLLGCNFSFNNLSGPIPSTKIFRSMAVSSFIGGNNGLCGAPLGDCSDPASRSDTRGKSFDSPHAKVVMIIAASVGGVSLIFILVILHFMRRPRESIDSFEGTEPPSPDSDIYFPPKEGFAFHDLVEATKGSHESYVIGQGACG

SEQ ID NO: 279137 - protein, 76 aa, Glycine max
  Clone ID: PAT_MRT3847_94083C.1.pep
QSSNHVVLFICKPNPIWSIDCTISLYKHIQIKGESTLGLEEGGRIEQKERCCSSSRIKIRFRLPRNFLTAQYGSFI

SEQ ID NO: 279138 - protein, 50 aa, Glycine max
  Clone ID: PAT_MRT3847_94084C.1.pep
MPGLIRSHLAYITIKIYSGPKVEKKLVCFFFPPPQKRKTKMKLYKCRKKK

SEQ ID NO: 279139 - protein, 65 aa, Glycine max
  unsure (1)..(65): unsure at all Xaa locations
  Clone ID: PAT_MRT3847_94085C.1.pep
SAKXLHVXTGISSSYTXTGASESQXVIIGTLLTSQRIRGQSLMHASXRXXYNESAIPPSXXXCIX

SEQ ID NO: 279140 - protein, 62 aa, Glycine max
  Clone ID: PAT_MRT3847_94086C.1.pep
ENTMLVYDNCCVKCILLCLNNFSLHKIVFPVAFIIHRIDIVTWHKLRRVILNIYMTIRHVTQ

SEQ ID NO: 279141 - protein, 43 aa, Glycine max
  Clone ID: PAT_MRT3847_94087C.1.pep
QEFMHYRFFICCFIMPDLSLEVTSRCNRSFIDFYFQINEFICQ

SEQ ID NO: 279142 - protein, 145 aa, Glycine max
  Clone ID: PAT_MRT3847_94088C.1.pep
DNIDIEGVIHAYYNITSQQCMVCKELSEEQAKIYTPLHSASLDESLRIVKDYLIATTAKDCSLMLCFRPRNEEDSGSVPDNVYLDSPEQSFDYKVYFIDLDLKRLSKVEDYYELDKKIVNCYRQIIKMDQGRNEEPGLKASNAAY

SEQ ID NO: 279143 - protein, 29 aa, Glycine max
  Clone ID: PAT_MRT3847_94089C.1.pep
LKIQGFLTHNNYPLLGGPLIKQPRFFRLG

SEQ ID NO: 279144 - protein, 148 aa, Glycine max
  unsure (1)..(148): unsure at all Xaa locations
  Clone ID: PAT_MRT3847_9408C.1.pep
DACAAMHVGAIEIIIDSFASPDCNIVGAMLLVDTYHTNPENAXRRYFVAPFKGGRPIRVVTFSNTIVQIEPDMNSRFQFLSTTTNGDFVQGKDLAMVKVXNVSCAACGLTSXYTPTPLLESGLHKDRWLICGVLLKEVLSLFITLISP

SEQ ID NO: 279145 - protein, 472 aa, Glycine max
  Clone ID: PAT_MRT3847_94090C.1.pep
MTEGDFHTTFFFFLRVPIQFIFLSLHGNVKLFSLFIFLCSSQFTTPYKYIQGPIFLIWVINLIISLLFSIQLIAFPSEFLSTLLLLQLIDFHGYKMKCFFFKEKCKSAPELHKKKTPAVNRAANSTGSVSSPKSVKDLYREKEHSFRVFTLQELRDATNGFNRMLKLGEGGFGSVYKGSITQPDGQGGDPIPVAIKRLNTRGFQGHKEWLAEVQFLGIVNHPNLVKLLGYCSVDAERGIQRLLVYEFMPNRSLEDHLFNKNLPTLPWKTRLEIMLGAAQGLAYLHEGLEIQVIYRDFKSSNVLLDADFHPKLSDFGLAREGPQGDQTHVSTAVVGTQGYAAPEYIETGHLKVQSDMWSFGVVLYEILTGRRSLERNRPTAEQKLLDWVKQYPADTSRFVIIMDARLRNQYSLPAARKIAKLADSCLKKNPEDRPSMSQIVESLKQALQYSDTTSQDIAESSSSSRSKLVRKK

SEQ ID NO: 279146 - protein, 102 aa, Glycine max
  unsure (1)..(102): unsure at all Xaa locations
  Clone ID: PAT_MRT3847_94091C.1.pep
PVYKYKSPPPPYKYPSPPPPPKKPYKYPSPPPPVYKYKCPPPPYNYSSPPPPPYKYPSPPPPAHYYKSPPPPPKKPYKXPSPPPPHYVYASPPPPYHYIILV

SEQ ID NO: 279147 - protein, 484 aa, Glycine max
  unsure (1)..(484): unsure at all Xaa locations
  Clone ID: PAT_MRT3847_94092C.1.pep
RPSFRYSTSDGAHSCCDWLEAKRRWCLSGTPIQNAIDDLYSYFRFLRYDPYSDHASFCTRIKNPISRNPANGYRKLQAVLKTIMLRRTKGTLLDGEPIISLPPKYIELKKVDFSMEERDFYSKLEADSRAQFQEYADAGTVKQNYVNILLMLLRLRQACDHPLLVKRYNSNSLWRSSVEMAKKLPQEKQISLLKCLEVSLALCSICNDPPEDAVVSVCGHVFCNQCICEHLSGDDNQCPAANCKSQLSTSMVFSKATLNTCLSDHGCYISPIYGGTVAEETEPWSESKPYDSLKMKAALEVLRAIXRRSCTNPAVIEKIEVXASAFGEDGTGDRQTRLTVDDLKYLFMMXIXDVHIYRYNLHFLDWXFFDLGADVILSFFPVTXLTKQKQNISSKGLEVVTRLLYGSLKWNPQTEDQAIDRAHRIGQTRPVTVLRLTVRDTVEDRILALQQKKRMMVASAFGEDGTGDRQTRLTVDDLKYLFMM

SEQ ID NO: 279148 - protein, 161 aa, Glycine max
  Clone ID: PAT_MRT3847_94093C.1.pep
QYSPPQLHLQSHNEPQPLQYQPQPHPHLLSQPPPPPHLHPQPQPQPQYQPQPGPIQQPQPQSQFQNQHFEYPARYPPPPWAATPGYANYQNNSPATNMIPQANTAAATISESTFSPACKISSPPMGRYTWICQLSKPLTCYKHDLSSSSQHCDILFICTRG

SEQ ID NO: 279149 - protein, 182 aa, Glycine max
  Clone ID: PAT_MRT3847_94094C.1.pep
GSRKDSLESQNLSDESRSSNGSVTVVGEKAIVFSQWTRMLDLLEACLKNSSINYRRLDGTMSVVARDKAVKDFNTCPEVTVIIMSLKAASLGLNLVVACHVLMLDLWWNPTTEDQAIDRAHRIGQTRPVTVLRLTVRDTVEDRILDLQQKKRTMVASAFGEDGTGDRQTRLTVDDLKYSFMM

SEQ ID NO: 279150 - protein, 70 aa, Glycine max
  Clone ID: PAT_MRT3847_94095C.1.pep
FKFAHSIGNPDDTYYAPDRPPPQKKVDHNFTQQTAITKNTPSYNKTHKKKKKNATTTRTGKPKTNTSEKT

SEQ ID NO: 279151 - protein, 78 aa, Glycine max
  Clone ID: PAT_MRT3847_94096C.1.pep
FYGRCTRQRIRWSKFLEKAIWENPIPGVYAVFIGIVKFCSSVVLDLHVTGLPLNLLCYISNEPRLVSVLLLLRLKIIP

SEQ ID NO: 279152 - protein, 79 aa, Glycine max
  Clone ID: PAT_MRT3847_94097C.1.pep
SRELFISMLSSSVRSLRAMHIHHVKYRVGINRLSTVLHLLDHSSNMIPHESPCSPVSLLTHCRYGYVSIATGSYFRPLD

SEQ ID NO: 279153 - protein, 624 aa, Glycine max
  unsure (1)..(624): unsure at all Xaa locations
  Clone ID: PAT_MRT3847_94098C.1.pep
MGGSESSKGVVMGRLVECIKEISGLPECQNLCKRVYGNLVRRVKLLSPLFEELKDGDESLSDEQLQSFESLFVALDSAKTLLKDVNQGSKLYQALRRNDTADKFQKVTEKIEAVLSEIPYCKLEISEEVREQIELVHAQFKRAKAQTEFADIQLDLDMAVAQKEKDPDPAVLKRLSEKLHLRTINDLKKESSELPELLITSGGELGDSFEMITSLLSKLSEXCSQKSLKLSDMNVKKPXIPDDFRCPISLELMKDPVIVSTGQTYERSCIQKWLDAGHKTCPKTQQTLVHTALTPNYVLKSLIALWCESNGIELPKKQGNCRTKKCGGSSLSDCDRTAISALLDKLMSNDIEQQRAAAGELRLLAKRNADNRVCIAEAGAIPPLVDLLSSSDPRTQEHAVTALLNLSINESNKGTIVNAGAIPDIVDVLKNGSMEARENAAATLFSLSVLDENKVQIGAAGAIPALIKLLCEGTPRGKKDAATAIFNLSIYQGNKARAVKAGIVVPLIQFLKDAGGGMVDEALAIMAILASHHEGRVAIGQAEPIHILVEVIRTGSPRNRENAAAVLWSLCTGDPLQLKLAKEHGAEAALQELSENGTDRAKRKAGSILELLQRMEGVDNLQSS

SEQ ID NO: 279154 - protein, 73 aa, Glycine max
  Clone ID: PAT_MRT3847_94099C.1.pep
PSTHTDTTNSMLDYHFKERDEALGAETLTLENITRQHEEICRYQYNADSLPYSKFCIIQKYTIPTSDYQKKNK

SEQ ID NO: 279155 - protein, 54 aa, Glycine max
  unsure (1)..(54): unsure at all Xaa locations
  Clone ID: PAT_MRT3847_9409C.1.pep
MRFSEKKRVKEKREIVXSTHEVLSKIGEXGSANPRFHQLELEINQRSEKEPEKV

SEQ ID NO: 279156 - protein, 65 aa, Glycine max
  Clone ID: PAT_MRT3847_940C.1.pep
HVDMIIIYASVDFVNDTESQPSKYSKTTQTPPNILLSYQVPCSERKESVYCHLVYSLRKGYLDST

SEQ ID NO: 279157 - protein, 41 aa, Glycine max
  Clone ID: PAT_MRT3847_94100C.1.pep
QTMAETYSIYNPSITSSIDNSQNFLYRQMTAKHNAKFLHRI

SEQ ID NO: 279158 - protein, 111 aa, Glycine max
  Clone ID: PAT_MRT3847_94101C.1.pep
AGGGLVDEALAIMAILASHHEGRVAIGQAEPIPILVEVIRTGSPRIRENAAAVLWSLCTGDPLQLKLAKEHGAEAALQELSENGTDRAKRKAGSILELLQRMEGVDNLQNS

SEQ ID NO: 279159 - protein, 70 aa, Glycine max
  Clone ID: PAT_MRT3847_94102C.1.pep
MGGSESSKGVVMGRLVECIKEISGLPECQNLCKRVYGNLVRRVKLLSPLFEELKDGDESLSDEQLQSFES

SEQ ID NO: 279160 - protein, 121 aa, Glycine max
  Clone ID: PAT_MRT3847_94103C.1.pep
AQTEFADIQLDLDMAVAQKEKDPDPAVLKRLSEKLHLRTINDLRKESSELPELLITSGGELGDSFEMITSLLSKLRECVLTENPEVGTGECEKLSVKHRSPVIPDDFRCPISLELMKDPVI

SEQ ID NO: 279161 - protein, 157 aa, Glycine max
  Clone ID: PAT_MRT3847_94104C.1.pep
KLCNGETSNEQDLDSVAWEGDVYSQVLGSERSGYIRGLGLGPTPSLLWGDKFSLGNISMNNNNMSNEMVPKLEQEMKELKERHEEEMNQMKELNQKQVAELTIMRQNQEKMMLELSFMREVMCRFMHTELPTPNFNRSYGQVSDSNGGRERAPRVPH

SEQ ID NO: 279162 - protein, 117 aa, Glycine max
  unsure (1)..(117): unsure at all Xaa locations
  Clone ID: PAT_MRT3847_94105C.1.pep
PTRTVEDDVKVVVSPTFACLHLVKSLLRPHTHVXAQNSCVHKRGAYTGQVRAEMLVNYXITLVIIGHSELSQLMNESYXLVEYKVAYALQQGLNIIACIEETMEQLEPVTTTDVDAE

SEQ ID NO: 279163 - protein, 79 aa, Glycine max
  unsure (1)..(79): unsure at all Xaa locations
  Clone ID: PAT_MRT3847_94106C.1.pep
HLFLNQRKAEVRVSSGRYATESAPNSIASDPDQLKSATLDIMVLLNYKFXHPKIILWIXHDAGTYNKNIEEWPHRGGAN

SEQ ID NO: 279164 - protein, 101 aa, Glycine max
  unsure (1)..(101): unsure at all Xaa locations
  Clone ID: PAT_MRT3847_94107C.1.pep
MKCAMCAVGGVALLLLGGGGPMGEAVTCTPTEWSPCLPAITSGAKPSNAWGAXXXXQKPCVCGYLKNARLKQYVNSPNARKTGASCGIPFPTCELIKPSYN

SEQ ID NO: 279165 - protein, 39 aa, Glycine max
  Clone ID: PAT_MRT3847_94108C.1.pep
RRLWHGLCGYLKNASLKQYVDSANARKTVASCGIPFPTC

SEQ ID NO: 279166 - protein, 166 aa, Glycine max
  Clone ID: PAT_MRT3847_94109C.1.pep
MHAYVSSEFGSSTGLELPVDAVVTLSQHPNIIGLKDSGGDVTRTGLIVHKTSKQDFQVLAGSVGFLLASYAVGAVGGICGLANVLGAQVCQLERLCLTGQGEAAQRLQHRLIEPNTAVTRRFGIPGLKKTMDWFGYYGGPCRAPLQELSPSEEEALRLDFSNNGWL

SEQ ID NO: 279167 - protein, 158 aa, Glycine max
  unsure (1)..(158): unsure at all Xaa locations
  Clone ID: PAT_MRT3847_9410C.1.pep
LHVFIFSPAHASVEKHVAHESLKDQIPAVVTMHSTKVXTFANILNLRHSVVGDLKLLTDGKLYEGKHXIPVSNISAGENHVAXIPLMAQEETLPSIASDFRTAMVSQNSKPQASAMHVGALEIIIDSFPCPDCYIVGAMLLVDHYHXTNPDNAISCFF

SEQ ID NO: 279168 - protein, 77 aa, Glycine max
  Clone ID: PAT_MRT3847_94110C.1.pep
LSRNTTSNAPIHHLFLRLINSHIVISPVFGPAVVSSVVKLTVTLNPPLIPLISDYSSENVCQHGDQLPPHVPRNVMW

SEQ ID NO: 279169 - protein, 76 aa, Glycine max
  Clone ID: PAT_MRT3847_94111C.1.pep
YMAPEYVMHGNLSVKADVFSYGVLVLELITGQRNSSFNLDVDAQNLLDWVRVFIIIFFTSLVVSLSPKYLLYSFRK

SEQ ID NO: 279170 - protein, 117 aa, Glycine max
  Clone ID: PAT_MRT3847_94112C.1.pep
LGFSKTLFHQIGLLARLSLLVSSFKGPKQLLSCGFWTFSWTKRQWRAYYFTGSSPPPIYSAFELGKYSETEPMNLMSLMKEPKVALHLRELLFYKELYVSCKPRKSKHIQSLNHTIL

SEQ ID NO: 279171 - protein, 102 aa, Glycine max
  Clone ID: PAT_MRT3847_94113C.1.pep
LMQGLLSMLPHLICTVLETPLEAHLRTSPHFTYMAVLNTLTLTRGHEDNGRDSDSTLESYVGDDPSETKARPCERKPLSRNSCGEGLPYAPGGGPNPSDGWG

SEQ ID NO: 279172 - protein, 104 aa, Glycine max
  Clone ID: PAT_MRT3847_94114C.1.pep
MGSNLNAELSKKTPIFGLKVWEIFGIVVGLSIIVILSVVSLCLTSRKKSRKDKDKIPLSQIPTVSKEIKEVRVEQVPTNVFAPRDGILLTIQDKSSDKESDKVM

SEQ ID NO: 279173 - protein, 50 aa, Glycine max
  Clone ID: PAT_MRT3847_94115C.1.pep
IVTYLGPQMRKRKLLPTFLKLFQVSGGRRILRFYGVKNQNFILNAEENNP

SEQ ID NO: 279174 - protein, 91 aa, Glycine max
  Clone ID: PAT_MRT3847_94116C.1.pep
VFPNLEYVGLDLWQVNSGSLFGAVLVSGGPGYARPLADVTWGQRKAVEKAAFVAAEKKGAEEESSVVPVASDAGGEEGGADEAGHGSDAAS

SEQ ID NO: 279175 - protein, 97 aa, Glycine max
  Clone ID: PAT_MRT3847_94117C.1.pep
KYHLYHLTQCEYIVYQIYEHVNLAHCGSCISRVLSSSTKTQSTTLLPAYIAELLCSLYEHSYHIHLDSANNLISRASVRKIFPQVSPDAWVDPGIRT

SEQ ID NO: 279176 - protein, 108 aa, Glycine max
  Clone ID: PAT_MRT3847_94118C.1.pep
GRHVSIDVVASAFEGQSAVYGHGLVYGAVWEGLRSVVHAVAPLSTCSPVFASPLACWFVGIRRCVLIYGGVLGVFVLFMNVCFAVVVWVRWCFAWRLRCVVRLHAFFL

SEQ ID NO: 279177 - protein, 117 aa, Glycine max
  Clone ID: PAT_MRT3847_94119C.1.pep
TGSPPIPKNSHLHTLSPNPPFPHLRIKPHHHPPWWLQAPGARRRRGRAPAEKTSGCRSSEKSKPSIHSLLHEPGPEPGLPEQGGQSPWASQPDGRAASLSTDSHRTEEGPEPEKEGR

SEQ ID NO: 279178 - protein, 59 aa, Glycine max
  Clone ID: PAT_MRT3847_9411C.1.pep
STKHGKENDSLSLWPAQRVSFFPLRNRPQKSRKKLRDSWNQVTIAFVSGFKVRQPMIPD

SEQ ID NO: 279179 - protein, 90 aa, Glycine max
  Clone ID: PAT_MRT3847_94120C.1.pep
KASNPFVNLKKEYKGIFWQEDIIPFFQNATIPKECDTVQKCYLSLAEQVREKLGKIDPYFVKLADAMVTWIEAWDELNPSTAAVENGKAK

SEQ ID NO: 279180 - protein, 111 aa, Glycine max
  Clone ID: PAT_MRT3847_94121C.1.pep
LGANPSAEGGGEYEGMLDASVKAVDLVHTFTLHERPTFGRRHLVSFVKTYIKSLTAKLHAAQPEWCKKHMSRAPKSLLFRSKISTFDVRSHHRRIMLCLIFDSYLDGASYP

SEQ ID NO: 279181 - protein, 237 aa, Glycine max
  Clone ID: PAT_MRT3847_94122C.1.pep
MERSSEEEMLITKGPWTEQEDSLLFNYITVHGEGHWNSVARYTGLKRTGKSCRLRWLNYLRPNVRRGNITLQEQLLILDLHSRWGNRWSKIAEHLPGRTDNEIKNYWRTRVVKQAKQLKCDVNSKQFRDTLRFVWMPRMLERIRAQASSSAQAHQSSLISNSNTQAHSGLLSSALHAHAPSLSDSSASYNLMGADAGSCSSHSYYSDIAGNGFGGADLWTDQNICFLQHQLAHHDLF

SEQ ID NO: 279182 - protein, 97 aa, Glycine max
  Clone ID: PAT_MRT3847_94123C.1.pep
RDKQPIPYHGFVQQSHFDLHSTSVTCHLRFRCSSATSPVCKSDSATHRATLNDVLADFISTFIFVFAGSGSGIAYSKLNDNGAATPAGLICASIGHA

SEQ ID NO: 279183 - protein, 263 aa, Glycine max
  unsure (1)..(263): unsure at all Xaa locations
  Clone ID: PAT_MRT3847_94124C.1.pep
MERSSEEEMLITKGPWTEQEDSLLFNYITVHGEGHWNSVARYTGMQSINYIHHLNPSFFLTHTHHVXITGLKRTGKSCRLRWLNYLRPNVRRGNITLQEQLLILDLHSRWGNRWSKIAEHLPGRTDNEIKNYWRTRVVKQAKQLKCDVNSKQFRDTLRFVWMPRMLERIRAQASSSAQAHQSSLISNSNTQAHSGLLSSALHAHAPSLSDSSASYNLMGADAGSCSSHSYYSDIAGNGFGGADLWTDQNICFLQHQLAHHDLF

SEQ ID NO: 279184 - protein, 281 aa, Glycine max
  Clone ID: PAT_MRT3847_94125C.1.pep
FKLLGPGPGYSCGPAKIVPSTAILTDDRRRKMQALMSWNVTCTYSQFLASKNPSCCVSLSSFYSDKVTGCPPCACGCQNNNTCVTKDSKILQENATLPHRKSDITLTPKPLLQCTHHLCHVRVHWHLKDNYKDYWRVKIAIINFNYRLNFTDWSLVVQHPNLNNVTQVYSFEYMPLLPYESINDTGMFYGLKYYNDLLMEAGPKGNVQPEVLMKKDKNTFTLKQGWAFPRRVYFNGDECMLPPPDSYPMLPNSGHKLPTTITLMATYVVFTLFFHLVVTLF

SEQ ID NO: 279185 - protein, 63 aa, Glycine max
  Clone ID: PAT_MRT3847_94126C.1.pep
NFKAPQCYSSLFLKHCDPPSSRSLRRVLKVAPLANRIFSWLGRCVPQHRRFRIVQGSGFYSCT

SEQ ID NO: 279186 - protein, 193 aa, Glycine max
  unsure (1)..(193): unsure at all Xaa locations
  Clone ID: PAT_MRT3847_94127C.1.pep
MSGWDEGAVYYSDQALAGDDGSGARGEAGTDSNHSLIQKFKEFIRNFETTNNVLPYRESLLHNPKFLLVDMGDLDTFDSDLPDKLRSNPADVLPLFEAAAAQVLVNLKTKVAGDTGDMEDQTPGDVQILLTSKEDPVSMRSLGAQYISKLCKLXGITIAASRTKAKATYVTLICKNCKKGKXGSVRAGLGGAI

SEQ ID NO: 279187 - protein, 75 aa, Glycine max
  Clone ID: PAT_MRT3847_94128C.1.pep
YKKRKKLKGKKKKEHYSNAMIIVDCTLFGGNVQSSELRPQKHETRNYKATQKHFIAKENIDRVQSFYGASLNLKP

SEQ ID NO: 279188 - protein, 48 aa, Glycine max
  Clone ID: PAT_MRT3847_94129C.1.pep
RLSRGPRCPRPKPAHQQRNGTQHLQKPLTTSRNLQQLECLARSATIST

SEQ ID NO: 279189 - protein, 140 aa, Glycine max
  unsure (1)..(140): unsure at all Xaa locations
  Clone ID: PAT_MRT3847_9412C.1.pep
GAGDNRLTEKTIFTCRDLDILVVYYTNSNLIXKFLPHYIRWHLYTLLIYILPTFLTAEIKXKRKLSNIHIFGLFYDGIYKFWTKHEKNLALTEKEKXGSYLKQRHSLLIVLAKRAXEFEKHVXYESPKDQXPRVDKLYIT

SEQ ID NO: 279190 - protein, 50 aa, Glycine max
  Clone ID: PAT_MRT3847_94130C.1.pep
ANESDVIITHEFITQGRICTPINWQSKAPGMDDMKCQNYKSIHLACRTMN

SEQ ID NO: 279191 - protein, 106 aa, Glycine max
  Clone ID: PAT_MRT3847_94131C.1.pep
NSHLMKSVGLLGLTTLRPTLPRKHKTVPQHSYARVQPPTSPVRVLVLPFALSLLPPLYFYIPLFYKLYACQRYNNYTSRSFSRYSKLIHVYPSWLSPGYHHSTFYP

SEQ ID NO: 279192 - protein, 96 aa, Glycine max
  Clone ID: PAT_MRT3847_94132C.1.pep
LEDPGVLKLPSKSLCGNTMPLSCPAKCFRADPVCGADGVTYWCGCAKAACAGVKVAKFGFCKVGNGGSAPIPGQALLLVHIVWLIVLGFSVLFGLF

SEQ ID NO: 279193 - protein, 87 aa, Glycine max
  Clone ID: PAT_MRT3847_94133C.1.pep
IIIFFFLYFFTKAPKSAPSHQQISPSTNIFFILKERSRTRIQASIQTESNNLSPNSSETVISYNTKHRKIHLNVSLLYFSFILSRAE

SEQ ID NO: 279194 - protein, 75 aa, Glycine max
  Clone ID: PAT_MRT3847_94134C.1.pep
VGTPHHHLKTLTHPFFTRNTAAPLSQTHAHNTIQTVNEISSSLTFRLIYFHVSSIVLFFRQIWDFDFIFLHPIGF

SEQ ID NO: 279195 - protein, 110 aa, Glycine max
  Clone ID: PAT_MRT3847_94135C.1.pep
ISKRLRKEEKRQLIICAFYILKRVPSAAKIMHLKPATFSGPGESMRRHGKVCHGPLSAYPPSGVCPAGVGPAGEGTTMAGLLVETTCCGQDCKSEKPFLTERHTSNPVVA

SEQ ID NO: 279196 - protein, 50 aa, Glycine max
  Clone ID: PAT_MRT3847_94136C.1.pep
SHGSSIGSRKFAYKNAYQIYGHIWRDVGKVVGMNLIMSYRKSNRKRNSLQ

SEQ ID NO: 279197 - protein, 118 aa, Glycine max
  unsure (1)..(118): unsure at all Xaa locations
  Clone ID: PAT_MRT3847_94137C.1.pep
EXXXXXXXEGGIPQFRITEVHVAGLKPEPQKKKLWGTSSQQQSGSRWLLANGMGKSNNKLSLMKSKAASKSNAPVTTKGQPGDSLWSISSRIDGARGKWKELAALNPHIRNPNVILPN

SEQ ID NO: 279198 - protein, 61 aa, Glycine max
  Clone ID: PAT_MRT3847_94138C.1.pep
AGGCSVGHKCDWKCENEHVCGIMYWWKLSGLTHMCDKKCNQRIVYDNDRCFWGARGEIYKF

SEQ ID NO: 279199 - protein, 61 aa, Glycine max
  Clone ID: PAT_MRT3847_94139C.1.pep
VSRDSASLFPDISIGSITPITGVNALLAIVYVVSQFDGLGELSIKRVDVIVTVEEWGYFLM

SEQ ID NO: 279200 - protein, 34 aa, Glycine max
  Clone ID: PAT_MRT3847_9413C.1.pep
KYTLPSGYHPCEYWTVLFRRNSNLILSVYVSLQG

SEQ ID NO: 279201 - protein, 61 aa, Glycine max
  Clone ID: PAT_MRT3847_94140C.1.pep
RVRTGARGPHTGVFDFGADEAIGRMVAAGPIQQTGIPQAQRCYLLGFSESPSSPLRLWLWE

SEQ ID NO: 279202 - protein, 80 aa, Glycine max
  Clone ID: PAT_MRT3847_94141C.1.pep
TKKPVILAIKVGQGTSTNTVYLCSMFQRLNELSCACACHWLLAHTTLCYESHAVDSHSIDTELTLCLPGSKTTATNRVLL

SEQ ID NO: 279203 - protein, 54 aa, Glycine max
  unsure (1)..(54): unsure at all Xaa locations
  Clone ID: PAT_MRT3847_94142C.1.pep
IYSPSTMCFPLFYLCHNKMLWRKHIARXHNSFXQAFSGTKVGGNTFFLVEFAFN

SEQ ID NO: 279204 - protein, 57 aa, Glycine max
  Clone ID: PAT_MRT3847_94143C.1.pep
ARLLILVLTASLSACCPLSAGVSGHVQRIARVERDVGLGLVAGLFFSSLFFQVFAFN

SEQ ID NO: 279205 - protein, 84 aa, Glycine max
  Clone ID: PAT_MRT3847_94144C.1.pep
TLSEFMLYTSQGSLRKSNVTPLLHQLSALLSLSALSCTTPYTNPPLMRSSHYSASVVALLLLSAYIYEFNFIITYLFNNKPTTL

SEQ ID NO: 279206 - protein, 95 aa, Glycine max
  Clone ID: PAT_MRT3847_94145C.1.pep
GGLLLGFPRWQPLPAGWGGFFWYLFWGGSLPPGVHFVGCTPGVFAGLFFGPGGLVFASCSVCGRFCSPLFFWVTGLFFPPLAMLGFYSQKGGLVR

SEQ ID NO: 279207 - protein, 80 aa, Glycine max
  Clone ID: PAT_MRT3847_94146C.1.pep
PPSKLIYHSLRVGTKFMKTMPYVSILTNKASDKRLIKSAFWPIPPLAFWPCHSVVASLQCTRGVSQLFASSNRSSLQSHL

SEQ ID NO: 279208 - protein, 55 aa, Glycine max
  Clone ID: PAT_MRT3847_94147C.1.pep
RLGIKLAQIVNKLSERNIDEILINRCGPSQMPYTLLLPSSNEGLTFRGMPNRISI

SEQ ID NO: 279209 - protein, 94 aa, Glycine max
  Clone ID: PAT_MRT3847_94148C.1.pep
FCGDKILTEMKWEKLNGRQDEVEAERIASSATIPLDKISKVCRGSDLPLRPCSGLCLHIVIAISMAVRHYGTPWLSFIPTPLQILFLDKGNLPL

SEQ ID NO: 279210 - protein, 37 aa, Glycine max
  Clone ID: PAT_MRT3847_94149C.1.pep
KCERIPISHRWQLCPGPPQVIIRLTIGKSGRPPGTGP

SEQ ID NO: 279211 - protein, 166 aa, Glycine max
  unsure (1)..(166): unsure at all Xaa locations
  Clone ID: PAT_MRT3847_9414C.1.pep
LFFFGDNRSTETTLFNCRDLDILAAYYTIATLLRKLVPHHIRWQSYTLLIYIVPSFVTAESNYKRHQSYIQISGXFYDGRYIFWTKHEKNLALTEEEKMAVIRNRGIPADVLAKRAHEFEKHVAHERLKDQIPAVDKLYSTKANKXAEIMNLTHSVGGDLKRLTDG

SEQ ID NO: 279212 - protein, 449 aa, Glycine max
  Clone ID: PAT_MRT3847_94150C.1.pep
MTMTGLISNRNFASFFASGNVYRSGKDISVQRGGISISGVSVAKDPFPRWQHKMYLPLEERVSKQMQTSNNKGEHRSLVSQQSSQCNFKLKASGRSRCSFLCSAPYGTNNVGHGEVYRLGLSKRKHAQTEVGKTNKFRVCYKSEEYDISETKMDPLQSTEGTGEAILLEGRALPWWQQFPKRWVIVLLCFTAFLLCNMDRVNMSIAILPMSQEFNWNSATVGLIQSSFFWGYLLTQIVGGIWADKLGGKLVLGFGVVWWSIATVLTPIAAKFGLPCLLIMRAFMGIGEGVAMPAMNNILSKWIPVSERSRSLALVYSGMYLGSVTGLAFSPMLIQKFGWPSVFYSFGSLGSIWFVLWLSKAYSSPDEDPDLGAEEKKLILGGNVSKEPVSVIPWKLILSKAPVWALIISHFCHNWGTFILLTWMPTYYNQVLAVYKSSFFFFAEFINDF

SEQ ID NO: 279213 - protein, 118 aa, Glycine max
  Clone ID: PAT_MRT3847_94151C.1.pep
MQIFVKTLTGKTITLEVESSDTIENVKQKIQDKEGIPPDQQRLIFAGKQLEDGRTLSDYNIQKESTLHLVLRLRGGMQIFVKTLTGKTITLEVESSDTIENVKQKIQDKEGIPPDQQR

SEQ ID NO: 279214 - protein, 284 aa, Glycine max
  Clone ID: PAT_MRT3847_94152C.1.pep
MQTLLLPATRAGSFTAVPLSASAVASPPLPQPFLSPNSFPSLLLNRARSSSSFSSSIARQPWKKLPFTASASSQVSPAFTPSNDESDKAKLEQVAKRLEKTARYFKRLGNLGFWGQLVCTVVAAVILSFSVVVTGKVTSPATFYATAGGIVAAFISVFWSFGYIRLSEKLRKTSNDPTKAPPRADVVKGLKNGIMLNLLGMGAAILGMQATVGLLVAKALTSSANPYYQGISPGSTPVLALDVFLVQASANTILSHFLGLVFSLELLRSVTLPPSDATPFPKFA

SEQ ID NO: 279215 - protein, 133 aa, Glycine max
  Clone ID: PAT_MRT3847_94153C.1.pep
AAFISVFWSFGYIRLSEKLRKTSNDPTKAPPRADVVKGLKNGIVLNLLGMGAAILGMQATVGLLVAKALTSSANPYYQGISPGSTPVLALDVFLVQASANTILSHFLGLVFSLELLRSVTLPPSEATPFPKFA

SEQ ID NO: 279216 - protein, 89 aa, Glycine max
  Clone ID: PAT_MRT3847_94154C.1.pep
YAFKYFVYFNSYYPYETVISLFTFITQILEESDERFGDEGVTEIVELVNKILPLPLNMKKEEISKGDEETATLKNEKGNKIRQDLIDDG

SEQ ID NO: 279217 - protein, 603 aa, Glycine max
  Clone ID: PAT_MRT3847_94155C.1.pep
SLLSTGMQQSFNDFLNDRSWHYQDPTGKIQGPFSMLQLYKWNASGCFPPDLRIWRVGEKQDNSILLTNALSEKCSKNVSLPFNSQLLSLGVSVTLDDKGNSQDAGKNAKNEISTDGQIIEQTKEQKPQVDNTSTQSDGKDEPVRSNGCSSQLPVYPLLLSTAIPEKLNEDPSDKLRKGHGIVGNSENRNNGSIRTSDGQSNSGHSYQKQSDSEENSGKSSGQTWRHPNVNSSSNCLVNTSTHVSDTKTSPHKLGFDLQNPPGLSRRCITSRRGRRHPDINSSSNCLVTTSTHVSSTKTSPHKLGFDLHNPPSPPACNTSSGQTWRHPDINSSSNCLVTTPAHVSATKTSPHKLGFDLHNPPSPPACNTSTWQAIIGEPNDFDESVSDLLAEVEAMESLGGLESPTSIMKCGEDLTEGSKNDCLSFVAELSPILDAGKGDALSSTGDLNLPSHPTAAEEPLRQADVHHHHHQRISAEDSSRSSKVEVGTKNGVSGNQWDSGSENSPIVPSPGTLGLAIDTTWRLGLENTHLGWSGIDQGNANVGWGVGQTAVQENRSSSSYTSTVTPGLGDSQTRYGSDRFSVSRDRRFQGHGRESGLVEAEFL

SEQ ID NO: 279218 - protein, 136 aa, Glycine max
  Clone ID: PAT_MRT3847_94156C.1.pep
LIDGFISVTFQSEVWHWSVSGLTESAEHLGVDSWSFADLWADFLLMETEEREKKESEGRDKSIDESHDKSFDINSSPPHSNQRFSTGASINSPTNQNISSHPRGYFQHSEQIGSEFSTVPLTSSDSKTTSSRLPRY

SEQ ID NO: 279219 - protein, 129 aa, Glycine max
  Clone ID: PAT_MRT3847_94157C.1.pep
HNKFSILEPSNHSHRKFKSPFFIEHVVSVLGEVNSLHLTTQQANHIKHQKYLLHKPIFPITRWQKRPRNRIWFRTSVWDTNPGKVGEGNAVAKRKCHGCEKGCGKESDSFRLQYLRGRRREKTRRKEKD

SEQ ID NO: 279220 - protein, 93 aa, Glycine max
  unsure (1)..(93): unsure at all Xaa locations
  Clone ID: PAT_MRT3847_94158C.1.pep
SLDFPFIQQFMILTSLSLSNSTPYLGGVLLLIVSAWLASAKSLYTQFTSLRKEXELYKEIERASSVKIPIISYTDSVNCFFATVSPLNPFSCY

SEQ ID NO: 279221 - protein, 79 aa, Glycine max
  Clone ID: PAT_MRT3847_94159C.1.pep
ACDFTDTCQLCVVYIYKDNGHFSSIVLNHASINENEEGVEELVPNCGFSCVVKTKSGIGEQPRLRRRVVEGDYFLRGTA

SEQ ID NO: 279222 - protein, 68 aa, Glycine max
  Clone ID: PAT_MRT3847_9415C.1.pep
QWNHCCSYHKTQVNGPSHSFHVQYREKEHNVTITIHRVKVLSLLIWVTQEQYWQQSVMKKLMAIQLTT

SEQ ID NO: 279223 - protein, 48 aa, Glycine max
  Clone ID: PAT_MRT3847_94160C.1.pep
AWLTSRDYLNRTLERYDNLGVIYTFERTWIFSYSVRPLQDEKGRVIII

SEQ ID NO: 279224 - protein, 41 aa, Glycine max
  Clone ID: PAT_MRT3847_94161C.1.pep
RFLNCQELKKVACWEFVPPAAGFSFRLAQMKLKDNVKNIHL

SEQ ID NO: 279225 - protein, 218 aa, Glycine max
  Clone ID: PAT_MRT3847_94162C.1.pep
MLHPAALIASCPYPYPYPGRHELPSASASATARVAVPMPNLRGKAVVGVGSRMIRCMANPRRVQMVAKQIRRELSHMLLTDKVLQYAVLPEASLGADRYLSSLTTITDVQVSADLQVVKVYVSVFGDERGKEVAIAGLKSKAKYVRSELGKRIKLRLTPEIRFLEDDSFERGSRVIAILDKIKNDKSQYKAELDSSPNEDHDDDWDGEDPDEGIIYVE

SEQ ID NO: 279226 - protein, 207 aa, Glycine max
  unsure (1)..(207): unsure at all Xaa locations
  Clone ID: PAT_MRT3847_94163C.1.pep
HVSIFKGEKEYYERQFATLKSFEEVDSIVISDCTDVEDIGKQAEHERAMKISNYANAVLLALKIYVTIRSGSIAVAASTLDSLLDFMAGGILCFTHLAMKDINMYKYPIGKLRGQPVGIIIFAAVIATLGFQVLITAVQQLIENNPPEKMSFDQLVWLYSVMIFATVVKLALWLXCRSSGNKIVRAYADDHYFDVVTNVIGLIAAVL

SEQ ID NO: 279227 - protein, 94 aa, Glycine max
  unsure (1)..(94): unsure at all Xaa locations
  Clone ID: PAT_MRT3847_94164C.1.pep
NAQFDNKDLVVEYADIKHSXYIYICKKLDMKYQXNANTITMDKCTNILFLFKYGITARXIYNRYGVEVKFPTAVPTISADNINSCHLFMSLDSF

SEQ ID NO: 279228 - protein, 61 aa, Glycine max
  Clone ID: PAT_MRT3847_94165C.1.pep
GKSTMVPSYTASRNREKRLKSRRGMSFLRVWRARSCDVGVMATKSLQRRSGEGSARSGFEI

SEQ ID NO: 279229 - protein, 49 aa, Glycine max
  Clone ID: PAT_MRT3847_94166C.1.pep
SSSDPAIRVAMGEDWVDLGADEVTTDGKHASTRGRRRINRIGYDPNEHN

SEQ ID NO: 279230 - protein, 49 aa, Glycine max
  Clone ID: PAT_MRT3847_94167C.1.pep
LMKYAEFISKDLMVLTASSPDITCSFSVPAATTPPSAAAELPLPFLLFF

SEQ ID NO: 279231 - protein, 66 aa, Glycine max
  Clone ID: PAT_MRT3847_94168C.1.pep
EKVILNSAQSESVSLRVKPRRDYSCYALQNYQYCLLKCVRCSSSNVVKPTLVQSQRCAKQHILCIF

SEQ ID NO: 279232 - protein, 66 aa, Glycine max
  Clone ID: PAT_MRT3847_94169C.1.pep
MDMASSPRTVEEIFKDYGARRTAVIRALTHDVDEFYGLCDPGKRVVNWIWFYFSAQFSSFALFCNI

SEQ ID NO: 279233 - protein, 74 aa, Glycine max
  Clone ID: PAT_MRT3847_9416C.1.pep
SALPFKVVLFEKHLGVGAHVCFVNFLWGQQAHLKNNFTCRDLTSCWYYTMHSIKNPTDYIGALLPCDYFPIFLL

SEQ ID NO: 279234 - protein, 48 aa, Glycine max
  Clone ID: PAT_MRT3847_94170C.1.pep
STCTATKFFVCKQPPLKNSPLLNSIRLTCNVGNRKSLLYMLITTTLSD

SEQ ID NO: 279235 - protein, 44 aa, Glycine max
  Clone ID: PAT_MRT3847_94171C.1.pep
LIYFFDSNLSYRIYNINFLKNKKIRLTQPSNSRPAPARAPPFHI

SEQ ID NO: 279236 - protein, 63 aa, Glycine max
  Clone ID: PAT_MRT3847_94172C.1.pep
DPRVFESVGAPPSIPCRHHPSVNPVPPLHFWPSLATTKGLRRLIIFVASKRQSSNFNFRKHKV

SEQ ID NO: 279237 - protein, 80 aa, Glycine max
  unsure (1)..(80): unsure at all Xaa locations
  Clone ID: PAT_MRT3847_94173C.1.pep
MHYGTLEDDLISAKRIHDNDFLSSIDPHVILTYKAQEKKSTAHEDPGSKPDWTESYLFTVSDSAYKLNLXILDKDNFILD

SEQ ID NO: 279238 - protein, 57 aa, Glycine max
  unsure (1)..(57): unsure at all Xaa locations
  Clone ID: PAT_MRT3847_94174C.1.pep
XXVCXVXAENGSSTSXXRRXRMXMRXXLEQEHXWIFXTXXXXXXRAEFRAYVRVHAT

SEQ ID NO: 279239 - protein, 72 aa, Glycine max
  Clone ID: PAT_MRT3847_94175C.1.pep
FIAAVKVTVVKISCEQYNKSYEKQDRTEFYIYIYIYIYIYIYIQLFCFFTYMLRHWIENSDWHIVRFFLWWS

SEQ ID NO: 279240 - protein, 50 aa, Glycine max
  Clone ID: PAT_MRT3847_94176C.1.pep
FLEIAGGFQGELICKVLQLLWGLYFLFLFPIMISIFYFVIVYWMCYCCPP

SEQ ID NO: 279241 - protein, 186 aa, Glycine max
  Clone ID: PAT_MRT3847_94177C.1.pep
MNSTFTMFSWGRRFQLSLRHSIRPFGSQSQGSTSSSSSSSFSSFGGSRHGDNRVRDFEAFLRSITSGVVVVSSTLGYWYWSSLSSPGANSLQSFADGYANEEDQFQQNDENKPKFLFNDGYRRRVFFNYEKRIRLQSPPEKVFEYFASVRSPSGEIFMTPADLMRAIGPVFPPSESNRVKEGFLRG

SEQ ID NO: 279242 - protein, 72 aa, Glycine max
  Clone ID: PAT_MRT3847_94178C.1.pep
TLGFFFLFCICTRGRTCEPQRGTRKPWTFHFHRCRLCEKVIRSKLDTRYELDSFIGKTVVPNEGTKPQFLRS

SEQ ID NO: 279243 - protein, 88 aa, Glycine max
  unsure (1)..(88): unsure at all Xaa locations
  Clone ID: PAT_MRT3847_94179C.1.pep
XVGILXIDXYXPPTXIQQELLEXXDGASKGKXXIGLXXDCXAFXTEVEXXXXXSXTVXXXXXEKXAXXXKQIGRLEVGSETVIDKSXS

SEQ ID NO: 279244 - protein, 40 aa, Glycine max
  unsure (1)..(40): unsure at all Xaa locations
  Clone ID: PAT_MRT3847_9417C.1.pep
SKKKRVKERREIEKSTHRVQYQIGEXGSTNPRIHQLELED

SEQ ID NO: 279245 - protein, 204 aa, Glycine max
  Clone ID: PAT_MRT3847_94180C.1.pep
MPKKRKSIATSLDEVDRTLYASFCTAANSLSQLYTHSMNHQKLSFNAGERHALEKLYQWIFRQQEGGSRVGTVDVLNYIQNELDYCGEEPSMSPRAPLQHQSQAALHVPSFPVTSASSGQTIAAQGLRSDHCENQSKNSVFSNALSSPVRRSLQHYQIGEGGCYTNGLSMGNGNRNTEPGFLNQQSRDSNAVSSNDSAMDMHAD

SEQ ID NO: 279246 - protein, 130 aa, Glycine max
  Clone ID: PAT_MRT3847_94181C.1.pep
HVPPSVTCHLTTDTLASGINTKLRVYGDAAVLLLCCCHFFLRTLGLLPRNYIPNNIVPYCRMFCHCLYICYASHPFSTQLALPLSVLSVVSPGILQFNLTLAPPTFPPLPHTSLFPPAPPPPPKEGGRHT

SEQ ID NO: 279247 - protein, 219 aa, Glycine max
  unsure (1)..(219): unsure at all Xaa locations
  Clone ID: PAT_MRT3847_94182C.1.pep
MAQIPNLDNAPVNLTSIREHSQKELLNILKNVRGKKCLVIDPKLGDSLSLIIQTSILKEHGVELRHLSGDPIQTDCSKVVYIVHAQPKLMRFICSNIHNDVSKGLQREYHVYFVPRRTVVCEKVLEEEKLHNMVTIGEYPLYSVPMDEDVLSFELDLSYKECQVDGDTSSLWHIAKAIHKLEFSFGVIPNVRAKGKASVRVADILNRMQAXEPVNSSDM

SEQ ID NO: 279248 - protein, 89 aa, Glycine max
  Clone ID: PAT_MRT3847_94183C.1.pep
ICQLCKDDVIAIPHALERYQDLDPTFSGTREYRLLADIAAAIDEEDVGKFPEVIKEFDSMTPLDSWKPTLLLRVKEKLKAKELEEDDLT

SEQ ID NO: 279249 - protein, 65 aa, Glycine max
  Clone ID: PAT_MRT3847_94184C.1.pep
NSTAFFALFVVCAFTISYLPSAACRFGLDTDDDPIQNGGTYYMSPRIRRTGGGIERESTGREVCP

SEQ ID NO: 279250 - protein, 48 aa, Glycine max
  unsure (1)..(48): unsure at all Xaa locations
  Clone ID: PAT_MRT3847_94185C.1.pep
HFLYWPDLXSEQTNTXHSFXYARLFVWRCTLFTSEXLSFLFSFXXVLV

SEQ ID NO: 279251 - protein, 41 aa, Glycine max
  unsure (1)..(41): unsure at all Xaa locations
  Clone ID: PAT_MRT3847_94186C.1.pep
RQRXQKAXCTSXEGSFLQXATXQQXXPMDGXLGRXXEGDQT

SEQ ID NO: 279252 - protein, 73 aa, Glycine max
  Clone ID: PAT_MRT3847_94187C.1.pep
SDVFWSRYVGLFPSLNDALLSRYLIRCTMLISAIILCIFSKSFLEGKCPCLLKKMPFPAQVTTSALGELYFIR

SEQ ID NO: 279253 - protein, 29 aa, Glycine max
  Clone ID: PAT_MRT3847_94188C.1.pep
CNIVAMIYSNIIVKSTSTGKTVKMRFLHD

SEQ ID NO: 279254 - protein, 141 aa, Glycine max
  unsure (1)..(141): unsure at all Xaa locations
  Clone ID: PAT_MRT3847_94189C.1.pep
YRGYVHKDLALKRRFQQVYVPDPSVASPLSTLGGLTERYXGRHGVRTLLRALVVAGQLYSRYISGRHLPGKAVGLVHKACAHVRVLLNSHPEAIDSLERKSRQLEVELHALEKEKGTASKACLXEVRKEPNXLRVKLQPLD

SEQ ID NO: 279255 - protein, 208 aa, Glycine max
  Clone ID: PAT_MRT3847_9418C.1.pep
ESTREQQDMHSREFRTLESGHKKSSISQKRVNIEDDRSSCVVNLDKKTNKAYIQTESGCDEVETILLSQKEFSGREGKLEISETILKETTDEYKKFVSSTSTTGKQTLTSKKVFSGREGNLAISETLSQETNDKHKKIVGSTSTTGKNVIDRSSQKYTGNLKIEDTERTSNTRMKDMEVKKDSVLSSVQGVEEQQYQKGEKIIKVKDK

SEQ ID NO: 279256 - protein, 80 aa, Glycine max
  unsure (1)..(80): unsure at all Xaa locations
  Clone ID: PAT_MRT3847_94190C.1.pep
ILCLEIYANDAFFDDQFGLAVDLYSESILLDPSDANLFRGXAQAQIKLNAFTDAVSDANNSIHINPSVPNAYLRTSIACI

SEQ ID NO: 279257 - protein, 74 aa, Glycine max
  Clone ID: PAT_MRT3847_94191C.1.pep
KTQASLHPHTTENYRTYWYQNSMLISVKYNMRHFKTPLPPTIMALTRIMLLSTILIANMPTPTSMMNISTMLIA

SEQ ID NO: 279258 - protein, 103 aa, Glycine max
  Clone ID: PAT_MRT3847_94192C.1.pep
APIPGRCQMKTYGGFFEALYLLRFIFIPTGQGVVRIMGLISVEHLPRPGFKVYSFCRWWPRILKLIRAPPLCPVRGFYFRNVVRCWDWKNKTVWWFFSPKLQK

SEQ ID NO: 279259 - protein, 108 aa, Glycine max
  unsure (1)..(108): unsure at all Xaa locations
  Clone ID: PAT_MRT3847_94193C.1.pep
TVDEGCLIHCFCGSNQVFYIKIIRNELTGQPXGYSFVEFAYHATTERVLQTYNATDQTYKLNWAFFIIHKRKPHAVLEHYIFIGYLTPYITDYLLQQMFRAHYPIVRG

SEQ ID NO: 279260 - protein, 70 aa, Glycine max
  Clone ID: PAT_MRT3847_94194C.1.pep
GAHFVWAFSLMFLFSGRGYWQELIESIVWAHNKLKVAPATQPRALSIVQGRAVGVTHYLLGGPFCRLLAA

SEQ ID NO: 279261 - protein, 62 aa, Glycine max
  unsure (1)..(62): unsure at all Xaa locations
  Clone ID: PAT_MRT3847_94195C.1.pep
FSPSTFKPTISFXSWDRTXKVWNLTNFFLRNTLFFVGGYVFFFXCFPDGYLCDSGGKDGVIL

SEQ ID NO: 279262 - protein, 96 aa, Glycine max
  unsure (1)..(96): unsure at all Xaa locations
  Clone ID: PAT_MRT3847_94196C.1.pep
HLSAIAAWEISTKAALVAELKKLEDLLEKKKAAYGEKMKNKVALVXKKHRSKGPLFXAQRGVKILQPKEKGAKFLSTRTPSKKNIGRLSIFKKFWF

SEQ ID NO: 279263 - protein, 72 aa, Glycine max
  Clone ID: PAT_MRT3847_94197C.1.pep
TRPYDCNRTPKGDLGFHWRCVCRRLLTNLVQSHTYRMSHLHGDAPKQDIVGITPDSKVVYQTIVETINVHIW

SEQ ID NO: 279264 - protein, 41 aa, Glycine max
  Clone ID: PAT_MRT3847_94198C.1.pep
MWVLVREFLFAGPVGEEEKNFFFSRLSQCNDYGEWWVGQIL

SEQ ID NO: 279265 - protein, 49 aa, Glycine max
  Clone ID: PAT_MRT3847_94199C.1.pep
ERKIFPASPKSLVQQFTGAANIFHRQAGNVWPPPWMNGLVIHSGNPLGK

SEQ ID NO: 279266 - protein, 63 aa, Glycine max
  Clone ID: PAT_MRT3847_9419C.1.pep
RLLTSNTYIFYMPNSVILRCTIMSTNNQHHLYSNMAVSYLHDYGIDIQMHLIPYIQIQLIHYV

SEQ ID NO: 279267 - protein, 105 aa, Glycine max
  unsure (1)..(105): unsure at all Xaa locations
  Clone ID: PAT_MRT3847_941C.1.pep
MDNFPNTKKTYWESRECMKNTLHRVIQYKTGMDSIAGHGKRRYDRKHCGYGXQTNPVFDXRPKPPRKLCKRLQRQGCKHVLEHAIKRCMHFEIGCDMKGKGTILF

SEQ ID NO: 279268 - protein, 91 aa, Glycine max
  unsure (1)..(91): unsure at all Xaa locations
  Clone ID: PAT_MRT3847_94200C.1.pep
MGIFSSVNSSNFGLHLLLLSVDLHSVEQTDCRQAYDSAAEXYMSSFDCAKPPEEGTHEKAVRISMAAFTASAVXGGSLRTKYESVLHKFLK

SEQ ID NO: 279269 - protein, 236 aa, Glycine max
  unsure (1)..(236): unsure at all Xaa locations
  Clone ID: PAT_MRT3847_94201C.1.pep
PGILSAKVVAEAAELAARNMPFEVVYYPKERWSEFVVKTEAVNEAMKVAWSPGFXVKIAAETDDSSRVSWCQGTVSSVALHGNGQWRGSLWRMLQVTWDEPEGLQIAKWVSPWQVELVSTTPALHSAFPPIKRIKAAHDSGVFTNGERDPFPMTGFTNSTMGQLNQALLSYGTFPAGMQGARHDAFSASRFCNYPTDMSRLCMGNSFGKSTFPWLKTLETEVNVGSSQSDELSPDS

SEQ ID NO: 279270 - protein, 100 aa, Glycine max
  Clone ID: PAT_MRT3847_94202C.1.pep
KLVVVIMLLVLLIFLLLCLASITLLVIRFHRDSTTSSSNNLCIHRAITTSDASLWSAATINATSIGGNSDQNNVVKGSSSSSSSLVPNLWLHRPGFGPPQ

SEQ ID NO: 279271 - protein, 117 aa, Glycine max
  Clone ID: PAT_MRT3847_94203C.1.pep
FKSAHFKLTHEMPQFLDPFGVIKSEAVNCTCSLCVKGYLAARRRMDGIITTVSLMLDSGLPCFSRGDPIGNLRKRFHPEMSEREAANFMTHVCKDAYNKWTTAGYDLIQYLQQGIEK

SEQ ID NO: 279272 - protein, 212 aa, Glycine max
  Clone ID: PAT_MRT3847_94204C.1.pep
GETTDGGLFEIFQQDYGPVGSASFEAARQNFIISSAGYAVASLLLQPKDRHNGNLLFDNVGRLVHIDFGFILETSPGGNMRFESAHFKLSHEMTQLLDPSGVMKSDTWNQFLSLCVKGYLAARRRMDGIITTVALMLDSGLPCFSRGDPIGNLRKRFHPEMSEREAANFMTHVCKDAYNKWTTAGYDLIQNLQQGIEKLDNIELTYHVHCCL

SEQ ID NO: 279273 - protein, 90 aa, Glycine max
  Clone ID: PAT_MRT3847_94205C.1.pep
PSGVGFSFGSRTRLGFGFAASGSGLRVSGRRGWRVFADGWWGEIFVFLFFGGSFLFFSGGNFFFLFFVLLRGLVVVVVAPLLPRNRTDAW

SEQ ID NO: 279274 - protein, 46 aa, Glycine max
  Clone ID: PAT_MRT3847_94206C.1.pep
DGNPDMRCCQISYGVLDAWLEQDPGSKVDCEIWTNADLDMVFGKIT

SEQ ID NO: 279275 - protein, 104 aa, Glycine max
  unsure (1)..(104): unsure at all Xaa locations
  Clone ID: PAT_MRT3847_94207C.1.pep
TIQLWTVETEDTRINVNWAFSYIILPVPLILYQXTTNNCIGSENPLIYLMILTKSPLHMAVIHIHHTYTSIYESTRHIHQHLTSYCSAHCNHHDSDPSMTVYST

SEQ ID NO: 279276 - protein, 53 aa, Glycine max
  Clone ID: PAT_MRT3847_94208C.1.pep
RRKSFAFSCMQCEGDPFESYVKPSCFSLCLIYSTRSWEKRNYCNILLHHHRER

SEQ ID NO: 279277 - protein, 33 aa, Glycine max
  Clone ID: PAT_MRT3847_94209C.1.pep
TLCSRGRMIKLPKTLTGLSITSYAARSDTTYNA

SEQ ID NO: 279278 - protein, 91 aa, Glycine max
  Clone ID: PAT_MRT3847_9420C.1.pep
DRSGNWRPNPFNHTSILRAVSNSIQETGPNISMEDPDPRQAQILQHDRNTKLTDRQWPVRPCGTTRNRRNVAIYRCSRHHSPDHNAGYILH

SEQ ID NO: 279279 - protein, 72 aa, Glycine max
  unsure (1)..(72): unsure at all Xaa locations
  Clone ID: PAT_MRT3847_94210C.1.pep
PKSQWIVRVTITLHMGPHSHKKVEWLKTVDQYYVGANNAIPGACVHNVLDSVTSALLKDNNPKFIXVEMAFF

SEQ ID NO: 279280 - protein, 124 aa, Glycine max
  Clone ID: PAT_MRT3847_94211C.1.pep
MDSKTKVAILIPGMLAILLFISSEVAARDLKEEGVLKETSKVGDAKLVGGGLQGSGRGSPTPVFPGRGIPGRGFPGQGFHGQGFPGQGFPVQGFPFPGQGYPLVPGQGFSRQGFPGQGFPWSGL

SEQ ID NO: 279281 - protein, 54 aa, Glycine max
  unsure (1)..(54): unsure at all Xaa locations
  Clone ID: PAT_MRT3847_94212C.1.pep
LCFSIXETNNNTGGSLKQLGAQKQANSSPPSLGLLSLPRALLPIHHSTWSQLEG

SEQ ID NO: 279282 - protein, 248 aa, Glycine max
  Clone ID: PAT_MRT3847_94213C.1.pep
MRMSCNGCRVLRKGCSENCSIRPCLQWIKSPESQANATVFLAKFYGRAGLMNLVNAGPEHLRPAIFRSLLYEACGRIVNPIYGSVGLLWSGSWQLCQAAVENVLKGAPITPITSEAAANGRAPPLKAYDIRHVSKDENSANETPHQRLKTRSRFKRTSSTLIKPKASKGTPLGSHESGLSHLSEAAMVEGESKESESVVSMETSNLVHEEPEWVAKRVSDEVGLELTLGFEPVSGVHHLVPLKKRKIE

SEQ ID NO: 279283 - protein, 110 aa, Glycine max
  Clone ID: PAT_MRT3847_94214C.1.pep
PSCGTSWPYAVPKAEAEQTQDDNEPRGSKQVIKSERKRRRANRVVDDEVGSNNQDEVNESRESQHGNGLVQKRGRPRRSDDADIGGSDASQSLTAIFDARRVTRSSARLS

SEQ ID NO: 279284 - protein, 77 aa, Glycine max
  Clone ID: PAT_MRT3847_94215C.1.pep
HLSAFAEDGSVADKFHKWHNGGGTLHESASIDSTALVEVGAVVHSESIVGPNVRIGSGTIVGPSVTIAHSTNIRYTS

SEQ ID NO: 279285 - protein, 82 aa, Glycine max
  unsure (1)..(82): unsure at all Xaa locations
  Clone ID: PAT_MRT3847_94216C.1.pep
MNLSNGKGSTFSSPLKAGDSVSDQFPAGLRVLVVDDDSTRLMILERMLRACVYXVTQCQLAEVALSLXRENNNGFDIVLSDV

SEQ ID NO: 279286 - protein, 242 aa, Glycine max
  unsure (1)..(242): unsure at all Xaa locations
  Clone ID: PAT_MRT3847_94217C.1.pep
GRVRLREDDRRVKNIKSQGTSGKKVKRNKSVPAETKKTGNDFDILNMVREINVDNLGTPTNFEPSSGHDHSLIKKELKDPEYATGKKRKASKTTPVPVPKRRRSSSAHGKLRLSTSISKASRRVSGVDSPQPKLPLDEEVNPDADSKTMQRKMVKGSEKDLLLSSLKRKVKGSDSYHNDELNKPDEHDMMSPDSTQXSDKTVGXNNKSSTGSTKKGKRKSISGLAKCTTKEGEIDTEDLIGC

SEQ ID NO: 279287 - protein, 88 aa, Glycine max
  Clone ID: PAT_MRT3847_94218C.1.pep
NMFWLHHESSSFIDWKSRGLVKNPCDHFFCIKERKAKNWFDLWHFEVAYSARWYCEEFRQLLPLSHELLPALHQFGTFMECNLLYSIM

SEQ ID NO: 279288 - protein, 46 aa, Glycine max
  unsure (1)..(46): unsure at all Xaa locations
  Clone ID: PAT_MRT3847_94219C.1.pep
XTLHFEIILLPRHXNXSDLXXXLPNLXEXWCLEASMNLXMXXXFYX

SEQ ID NO: 279289 - protein, 39 aa, Glycine max
  Clone ID: PAT_MRT3847_9421C.1.pep
RPCFSFFFVFIMGHFKMTCDDFSKLDYTYAMNSLFWPDF

SEQ ID NO: 279290 - protein, 68 aa, Glycine max
  Clone ID: PAT_MRT3847_94220C.1.pep
SPQTYGPFQPCMAISGHRGVCPLQELFGKEVHDRTPRSVEAVALDVPTAEEARKVAAQNLSGPVPPKP

SEQ ID NO: 279291 - protein, 115 aa, Glycine max
  Clone ID: PAT_MRT3847_94221C.1.pep
NASAAKDRLERESLTDTSQLHSHDQYIIHIITIKTNNTCAINDRAIGITKERVDNNTLTIARSVTKEYMEALAAGADVSMIGQFADGSYYAYLVTDKAIATTKHNDDEQYVCESH

SEQ ID NO: 279292 - protein, 37 aa, Glycine max
  Clone ID: PAT_MRT3847_94222C.1.pep
FGSATLEYWGNLVYHDFKAVIIFKNTLSNLEPTPVNP

SEQ ID NO: 279293 - protein, 116 aa, Glycine max
  unsure (1)..(116): unsure at all Xaa locations
  Clone ID: PAT_MRT3847_94223C.1.pep
THPQAQTPTPKGRPRTKNXNPGPTPHRPQGPKPKGKPRKPTPKTNKKEXPPRKKTPPTPXKQKAPPQKKKTPPPPKQPEKKKRRAQQDQQSTKQRQKTNSKGIKYCMLEFSQLLLF

SEQ ID NO: 279294 - protein, 82 aa, Glycine max
  unsure (1)..(82): unsure at all Xaa locations
  Clone ID: PAT_MRT3847_94224C.1.pep
STTTTATCSSTXSERVADIENEISHDHDYVVEFPTAMNPKEPVPVVKIKPVRVKPAPIVNYPGKQKNKLPLLKIKPVFLDSL

SEQ ID NO: 279295 - protein, 80 aa, Glycine max
  unsure (1)..(80): unsure at all Xaa locations
  Clone ID: PAT_MRT3847_94225C.1.pep
CLSYARGTGSAPSASCCSGVRNLKSAASTAADRRAACNCLKNAARGVSGLNAGNAASIPSKCGVSIPYTISTXTDCSRVN

SEQ ID NO: 279296 - protein, 110 aa, Glycine max
  unsure (1)..(110): unsure at all Xaa locations
  Clone ID: PAT_MRT3847_94226C.1.pep
TQEGSDIKVYPKSNNLILLMHTIPNPSQTAYKGGICQINITLPDRYPFKPPKMKFKTKVWDPNISSQSKAMYLNILKDQXSPALTLKTTLLSMQALLSTPHANDPQDTIV

SEQ ID NO: 279297 - protein, 73 aa, Glycine max
  Clone ID: PAT_MRT3847_94227C.1.pep
IGSLTTTLIICAFAWLLYCLLSYDGLCTFWLLRLSDFWLASSFVTYVVFPPPPNQGGESFIHVMTRLPCNRNR

SEQ ID NO: 279298 - protein, 501 aa, Glycine max
  unsure (1)..(501): unsure at all Xaa locations
  Clone ID: PAT_MRT3847_94228C.1.pep
AREKIPHLLXLGINAVDTLPVFEIDKLEFQRRPNPRDHLIKRWGDPTRNSIAPICRHARTGGWAFSASPEYKKLVISFHANRLEVILDVVENFTXECNKXFPLTISLGLFTLXTFDMLEYNGQLLNFSGCGNTLNCNHPVVMELILDSLRHWVTEYHVDGFRFDLASVLCRGIDGSPINAPPLIRAIAKDAVLSRCKIIAEPWDCGGLYLVGSFPNWDRWAEWNGKYRDDVRKFXTTGDSGVKGSFATRVAGSSDLYRVNNRRPYHSINFVIAHDGFTLRDLVSYNFKHNKANGEGGKDGSNDNFSWNCGFEGETDDASIRALRSRQMKNFHLALMISQGTPMMLMGDEYGHTRYGNNNSYGHDTAINNFLWDQLDARKSDHFRFFSKVIKYRHAHEVFSRENFLNTNDITWHEDNWENPDSKFLAFTLHDRSGGDIYVAFNSHDYFVKVLLPTPPKKRNWFRVADTNLKSPDDFVLDGVPSVGNTYNIAPYSSILLEAKF

SEQ ID NO: 279299 - protein, 67 aa, Glycine max
  unsure (1)..(67): unsure at all Xaa locations
  Clone ID: PAT_MRT3847_94229C.1.pep
NKFMFFGNGVEFRDLFQKKKNWIXKKEGKIFFLTWGALLLFWGSAAKPAQFPFHGGLPNAMEGPGPG

SEQ ID NO: 279300 - protein, 216 aa, Glycine max
  Clone ID: PAT_MRT3847_9422C.1.pep
KRIIHYDIKPENVLLDINLEPKVADFGMAKLCSRENNVSVNTHFKGTRGYAAPEMWKPYPVTEKCDVYSFGILLFEIVGRRRHFDDAYSESQEWFPKWTWNMFENNELFVMLSHCGIENKDREIAERMSKVALWCVQYSPDDRPLMSNVVKMLEGEIEISPPPFPFQNLMNDKPKSPPNGGPVDSGSGTTTSWETESLLESGSKIKNNAFQIEKPP

SEQ ID NO: 279301 - protein, 109 aa, Glycine max
  Clone ID: PAT_MRT3847_94230C.1.pep
ALRIWSLPVKGSMWVLKRGKFSHPAWTNEKTGANEEGEDEGEARAVTAIPIQPSFPPTQQCHYSVYNKPSPYPPANYPQKAIPINQPQSLPIGLSNVQTPPFTVNQNTN

SEQ ID NO: 279302 - protein, 52 aa, Glycine max
  Clone ID: PAT_MRT3847_94231C.1.pep
IVKTSLVVYILKKQNLKTCSQSFQGIMVGITVAGLIYTNYLDPGPMHCPNLN

SEQ ID NO: 279303 - protein, 123 aa, Glycine max
  unsure (1)..(123): unsure at all Xaa locations
  Clone ID: PAT_MRT3847_94232C.1.pep
PPGRLTRPFSARDTPAPLMESGPQKDRGSIVADYGRXSDVAHNTNQPQEKDVGEGNLHLDGKSRSTEGKVDATKAQGDTGKTFTDDTIGAGSHSSEHGPENEEQEQPTKTDARLRQRINPQYN

SEQ ID NO: 279304 - protein, 53 aa, Glycine max
  Clone ID: PAT_MRT3847_94233C.1.pep
PGIRLGLNRSRFICFSFFSGFWQNWSDGFNFSLCKYFNFSNSHLRMLIRSQIF

SEQ ID NO: 279305 - protein, 165 aa, Glycine max
  unsure (1)..(165): unsure at all Xaa locations
  Clone ID: PAT_MRT3847_94234C.1.pep
QTYGLSTPNLQQLAIKILSLRCSISGCKHNWSVFKQIHSKKRNRPEHKRLHNFVYAKYIQALVKRYNYKDENDPISLSDIDECNEWLVGXVDDDDDAGNERVFEDENDDGLPWDVVFEASGIGQPMAYTRQRTQKRKKPLSVEDVAPKTKRGQVRGCHPLEEKSK

SEQ ID NO: 279306 - protein, 144 aa, Glycine max
  unsure (1)..(144): unsure at all Xaa locations
  Clone ID: PAT_MRT3847_94235C.1.pep
RNHTALSQPEKLWAYDVLIVVFFPEGTYFAKGALRYSLNRDSVQVAAYCPRSVHLITYSPTLSSSNPPSRLLSTRAGSIISNVTIVHNACWLWLSMHEVYRQGNDIYFSVRIVSVDFXESDKFLXSPQCGSGFDCKTLPLYGDY

SEQ ID NO: 279307 - protein, 98 aa, Glycine max
  Clone ID: PAT_MRT3847_94236C.1.pep
FSRCNCWFVHGPASWESSPTMVAHSICVGCSPMINDRPPGVCSAVRAVQLSTRASNVSGASQVLRISVTLCGVPDIPMRLGTKWLSRQLWPSVWSFQE

SEQ ID NO: 279308 - protein, 86 aa, Glycine max
  Clone ID: PAT_MRT3847_94237C.1.pep
FIFQALMVWLWGINLWFFAQGGVNYAKIFDLDQSHLTHREIWKCATWMTIIVPTSMTAYIYLYSHGEVSYAAFTTSVIDASTLISY

SEQ ID NO: 279309 - protein, 73 aa, Glycine max
  Clone ID: PAT_MRT3847_94238C.1.pep
QDENGKDQVPFNLKQPRTSMLYEIMNSSMRMRVSHMVLIKLGTMLNASHICHSQELIIDVSSVWAGLTTSLQL

SEQ ID NO: 279310 - protein, 427 aa, Glycine max
  Clone ID: PAT_MRT3847_94239C.1.pep
MFGGVNAPANSPHLRKSGSRPVVYDLDEHEVENGIEEGLLHPVEADDSKGGTPVSAAAMMPTPILLWRFKVLLFFIWGFICCKVGWDSVMRMSADKRDLFLYEAFLYFNPLLLAALMVWLWGINLWFFAQGGVNYAKIFDLDQSHLTHREIWKCATWMTIIVPTSMTAYIYLYSHGEVSYAASQPVLLYAAAVMVLIFPFDIFYFSSRYFFLRTLWRIVFPLQAISFADFFLADILTSMAKVFSDLERSVCRMVHRQVATIAWLEADSVCGSHSVAIPLVLVLPYLFRLNQCLRQYKDTGEKTTLLNALKYSTAVPVIFLSALKYHVFPERWTNFYRPLWLLSGVVNSSYSFYWDVNRDWDLSGFTRIFKFNKPHLFSHMLHGRRWVYFWVIGSNLVLRCTWTYKLSAHLRHNYLTFIAAWRFSVTT

SEQ ID NO: 279311 - protein, 116 aa, Glycine max
  Clone ID: PAT_MRT3847_9423C.1.pep
EFLNDYLKKNIRSLRGMHSLSSIFFFVSLLSSLTTLLLHHFSVAAPVTKIRGTDFWCRAAIACGNRFLDQCIGQTIGVRHEFGGLYQLTPMIACVSSAYPALTHICLGDPSLERLR

SEQ ID NO: 279312 - protein, 323 aa, Glycine max
  Clone ID: PAT_MRT3847_94240C.1.pep
PKRILQTNNISFSFSLILLCHRWIWKRWFPPAPGGCSDQKIACEPHADEGDHGGRLPDSPPESFWLSGDAEYDWWDRNAVYERNESTKGNSIISSTNLNSNSNNNSQRFSKNLKSKAAIIGLPKPQKATFADAKSRRNHRPPGNARLFPKRSASVGGKLEGSVVEPSSPKVSCIGRVRSKRDRNRRLRTRQRSISSSTATAATTGSISSAVTRQKSTRSQRKKTGFFESVRAIFRHGRRGKPVQKPDLPQEDSSSSKMKKKRSYGKKARGSTTSSTTNRNDASFEESFSSAAPPPGLGSVNRFASGRRSESWGVGDSEIRVLH

SEQ ID NO: 279313 - protein, 140 aa, Glycine max
  Clone ID: PAT_MRT3847_94241C.1.pep
WTNFYRPLWLLAGVVNSSYSFYWDVNQDWDLSGFTRIFKFNKPHLFSHMLHGRRWVYFWVIGSNLVLRCTWTYKLSAHLRHNYLTVFFIAALEIFRRFQWIFFRVENEWNKMNSKSHSHLSVNEIPDDEEKLLHSINYSV

SEQ ID NO: 279314 - protein, 58 aa, Glycine max
  Clone ID: PAT_MRT3847_94242C.1.pep
PPRNSDLISYGFRIGLLRRQIIRIHVMNICASEFNENVELEFPEGFGSYFRWVSGRPY

SEQ ID NO: 279315 - protein, 79 aa, Glycine max
  Clone ID: PAT_MRT3847_94243C.1.pep
AVVWRVCWKKKMVKSFFFFKISQWSFKAKKKNFAFLLLKMSFFSFKSENYQILFFKSFLSFPQQKKKGFSKGFFLFSSS

SEQ ID NO: 279316 - protein, 131 aa, Glycine max
  Clone ID: PAT_MRT3847_94244C.1.pep
FFFFFFFFFFVFFFFFFFLPPNPPNFILFSKSKLLHGFWGSLRENFGGKKKGEPGLGLWFFYPTPTSYLQGSSFENRKGKKRGGGGFFYRNPKTTWKNPSLPWEKIFKKKNLLSLLKENFSLSKKQKELNN

SEQ ID NO: 279317 - protein, 144 aa, Glycine max
  unsure (1)..(144): unsure at all Xaa locations
  Clone ID: PAT_MRT3847_94245C.1.pep
LGGINSLLAIEHSGHLPLIKDTPTMILGMDVSHNSLGRLDSPSIAAVRLVWFCISCTSIFLDFWLSLQHIVLLYNVGLXVVGSRHWPLISRYRASVRMQASKVEMIDALYKPLENGSDDGIIRELLLDFYDSSNGRKPTQFIVF

SEQ ID NO: 279318 - protein, 174 aa, Glycine max
  unsure (1)..(174): unsure at all Xaa locations
  Clone ID: PAT_MRT3847_94246C.1.pep
GKEKVHIPIEDFGHVNSGKSTTTGPLIYKLGGIDKRVIERFEKEAPEMNKRSFKYAWVLDRLQAERERGITIDIALRKIQTTTYYCTVIDAPGPMDLINNVITGTYHADCAVLMIDSTTDGLXACIYNDGLTLEHALLSFTLCVXRMMSXVTKLDATTPQYFEAQDYANAKGVT

SEQ ID NO: 279319 - protein, 117 aa, Glycine max
  Clone ID: PAT_MRT3847_94247C.1.pep
VSPPMGPPGHPYFGPPPNRGGNLARNTPSPKEQYMPMFSPTSTGPPKGEGGPPPGTRPRNIPGGGGPNNGGAPPLGLALFFFSVLGYFILFYFISLFAGEFFFFLLFFIFFCFCGSS

SEQ ID NO: 279320 - protein, 133 aa, Glycine max
  unsure (1)..(133): unsure at all Xaa locations
  Clone ID: PAT_MRT3847_94248C.1.pep
MAKFEYWPRYGFENHTLVLPAERAFNMTDSTLWMQENWLSSFAFPALYVVAIFGGQKLMSSQKPFALDQALFWWNLGLATFFIMGAVRMIPELFWSLNFNSFIYSICTAFNAQGVXTGFWTEKFALSKVFELV

SEQ ID NO: 279321 - protein, 33 aa, Glycine max
  Clone ID: PAT_MRT3847_94249C.1.pep
NGPTDAYAHSSVQLLEHFLKFHITLKTRCNFID

SEQ ID NO: 279322 - protein, 47 aa, Glycine max
  Clone ID: PAT_MRT3847_9424C.1.pep
GSEVLLVIIQTPPGFGNVPWRSHLMMTKHPLLLDQLSEVTALVEPPY

SEQ ID NO: 279323 - protein, 89 aa, Glycine max
  Clone ID: PAT_MRT3847_94250C.1.pep
QALADALDSGRLAGCALDVGRAADQMPTPALAAHPRVIATPHIGGLTLPAVEHQARETVDQLAALLAGRVPAGAVNAAHATRLARWRPA

SEQ ID NO: 279324 - protein, 64 aa, Glycine max
  Clone ID: PAT_MRT3847_94251C.1.pep
DLQVGAGYPRFLLEYESNPAVLLNILQGTGHLLTSKHLTGTVKGAEVHNRLLRNEDIKKKLKCR

SEQ ID NO: 279325 - protein, 73 aa, Glycine max
  Clone ID: PAT_MRT3847_94252C.1.pep
ILKPTEMKSYFTRELQYHIFKNYREHNCSYMTCHYENTYYAYSKSKRNEIGITKEIAIPHLQAIWMQNFSYMN

SEQ ID NO: 279326 - protein, 284 aa, Glycine max
  Clone ID: PAT_MRT3847_94253C.1.pep
MASLGGLQNLSGINFLIKKEGPKVNAKFELKPPPYPLNGLEPVMSQQTLEFHWGKHHKTYVENLKKQIVGTELDGKSLEEIIVTSYNKGDILPAFNNAAQVWNHDFFWECMKPGGGGRPSGDLLNLIERDFGSFEKFLDEFKTAASTQFGSGWAWLAYKESRLDVENAVNPLQSDEDKKLVVVKTPNAVNPLVWNYYHPLLTIDVWEHAYFIDFQNQRRDYISVFMDKLVSWDAVSSRLEQAKALIKEREREAERKRREEEEKRTSSEAIPEIYSDGDADLDAE

SEQ ID NO: 279327 - protein, 58 aa, Glycine max
  Clone ID: PAT_MRT3847_94254C.1.pep
SNRTSRCVRHFSSGPFSHPRGQGLSILFKSICWRTLPSQIAPIFSRLGVFLSSHIKCV

SEQ ID NO: 279328 - protein, 87 aa, Glycine max
  Clone ID: PAT_MRT3847_94255C.1.pep
VLFYFWNEGEFMQKRQQKRDTILYKVANLDLIRRGRMQSDLARQKGVFPVEDKMLGKIEAGAEIVGLALTGSGDAAAGLNEKSITVR

SEQ ID NO: 279329 - protein, 64 aa, Glycine max
  Clone ID: PAT_MRT3847_94256C.1.pep
YPCGCQSCDPLCLLCKRGSHQSTYSQVNQTHSARPYSAPGLLVVTVFKEYPSLGVLCPCGRLPR

SEQ ID NO: 279330 - protein, 130 aa, Glycine max
  Clone ID: PAT_MRT3847_94257C.1.pep
VVNFNKFVSQVLSCRDGSISLINVRLDIFESIGSQLLNRIMKYAVWHNVPQLTMYIPFYYGKISTYLDPIIFSCQSLTYLELHNISCWPPLELPKSLQLPALKTLRLSRVLFTATDNVCAEPPFCRLSQP

SEQ ID NO: 279331 - protein, 178 aa, Glycine max
  Clone ID: PAT_MRT3847_94258C.1.pep
MEPPTGFWASIWNFVCFLPFFVGLWLLGNIKGVIFCPLVCLVMTIGNSAIIHGLWPIHCIWTYYCVVRSKKLGPALKFVTCTCILPLVLILWPVAGIVGSVIGGAAYGFFAPIFATFEAVEGGKENKLFHCFIDGTWSTIRKTFDIVKDVKNECYDSYFSFMDDLLQLNGKYYEIRLR

SEQ ID NO: 279332 - protein, 94 aa, Glycine max
  Clone ID: PAT_MRT3847_94259C.1.pep
QTESCYSQHLISLQGTPHSHKQIPMPQTTSRYRIIKTIQVHSLNTQKNTSVLAEAAKHTCNIMGTEAHRYYKSLFRKAASRLSHDDCLSFARCF

SEQ ID NO: 279333 - protein, 422 aa, Glycine max
  Clone ID: PAT_MRT3847_9425C.1.pep
MKRMNESNNTDDGNNHNWLGFSLSPHMKMEVTSAATVSDNNVPTTFYMSPSHMSNSGMCYSVGENGNFHSPLTVMPLKSDGSLGILEALNRSQTQVMVPTSSPKLEDFLGGATMGTHEYGNHERGLSLDSIYYNSQNAEAQPNRNLLSHPFRQQGHVNVETHPYYSVFACRGLSGVSVGTVGCGELQSLSLSMSPGSQSSCVTAPSGTDSVAVDAKKRGHAKLGQKQPVHRKSIDTFGQRTSQYRGVTRHRWTGRYEAHLWDNSCKKEGQTRKGRQVYLGGYDMEEKAARAYDLAALKYWGPSTHINFSIENYQVQKKKKKKKKKSGCVAHLRRKSSGFSRGASIYRGVTRHHQHGRWQARIGRVAGNKDLYLGTLAPRAYGTQEEAAEAYDVAAIKFRGANAVTNFDISRYDVERIMASSN

SEQ ID NO: 279334 - protein, 81 aa, Glycine max
  Clone ID: PAT_MRT3847_94260C.1.pep
RTWLIPNKTSANMDLIKSAMDTYQKSQGQGHTGQQNPGNNQAGGDFGVTGGSRFNAPNSVSYGQFACDLDGDGIIDTANND

SEQ ID NO: 279335 - protein, 81 aa, Glycine max
  unsure (1)..(81): unsure at all Xaa locations
  Clone ID: PAT_MRT3847_94261C.1.pep
MPXGXREXGHKGXVRQYTSPEEIDAQLQAEKQKANEEDEQEEGGDXASGXPKKEKKSLDSDESXDEDDGYQQXXKGVEGSL

SEQ ID NO: 279336 - protein, 60 aa, Glycine max
  Clone ID: PAT_MRT3847_94262C.1.pep
SFVCFVSSATAPLFFIFYLSVSRLSFNSFFLKEIIYEYFKIILYQNFNYFIINLKTIFYM

SEQ ID NO: 279337 - protein, 134 aa, Glycine max
  unsure (1)..(134): unsure at all Xaa locations
  Clone ID: PAT_MRT3847_94263C.1.pep
MPETIALCQEPATEGERKHCASTLESMGDIVVSALGKNVDAFSTEKERETDSAKLVPXKNGARKLRDDKAIACHATSHPYVVSGCHLLPRSSGYSPPSKGEDGXRVKAVAACHRXTKRADHNHAAFKALNLKPG

SEQ ID NO: 279338 - protein, 57 aa, Glycine max
  Clone ID: PAT_MRT3847_94264C.1.pep
FRPFFFFFFFFLFLFVFSCLRLHFFILFLFFTYEIFHLDGALHRMKRTSNCPTYFEK

SEQ ID NO: 279339 - protein, 33 aa, Glycine max
  Clone ID: PAT_MRT3847_94265C.1.pep
KKWIRYVNSISEHSSQSEDRDYVPYEGDVCDVV

SEQ ID NO: 279340 - protein, 46 aa, Glycine max
  Clone ID: PAT_MRT3847_94266C.1.pep
ISDLVPGTVTARKCATRVGSSLMLHLAAARSVASPSSARASIELEP

SEQ ID NO: 279341 - protein, 157 aa, Glycine max
  unsure (1)..(157): unsure at all Xaa locations
  Clone ID: PAT_MRT3847_94267C.1.pep
MQNREKETMSLKVVTVVFLLATIVVASDDTSFTYNGFQSSYLYLDGSAEFTTNGMLKLTNHTKQQKGHAFFPSPIVFKNTTSGSVFSFSTTFVFAIRSEFPNLSGHGIVFVVSPTKGVPHSLPSQYLGLFDDTNNGNNSNHIFGVDXDTILNTEFGD

SEQ ID NO: 279342 - protein, 102 aa, Glycine max
  Clone ID: PAT_MRT3847_94268C.1.pep
PAFSGVLVFVPSSALPAFPRAWARAASGLWAWRGVVRLGLFGSGWPFASRLAARSLSFAWLGFLPSLGVVCPPSLSVLSPLGVGVSPVLIRARGSSRVFRSG

SEQ ID NO: 279343 - protein, 124 aa, Glycine max
  unsure (1)..(124): unsure at all Xaa locations
  Clone ID: PAT_MRT3847_94269C.1.pep
IGGFLTHCGWNSTIESVCSGVPMITWPLFAEQFLNEKCIVEVLKIGVRIGVEVPVRFGDERKXGVLVKKIQIMEAIEMIMEGGEEGDKRRSGVTELGNIARRALEEEGSSRFNISCLIQDVMKH

SEQ ID NO: 279344 - protein, 67 aa, Glycine max
  Clone ID: PAT_MRT3847_9426C.1.pep
IGSQNKIVMLNYPPFCPKGFDTQRPHLKKGFFFFFLPMLLKKVRVYTKNVVNFQCNQILIPPKTSPG

SEQ ID NO: 279345 - protein, 99 aa, Glycine max
  Clone ID: PAT_MRT3847_94270C.1.pep
GHQKTILLFGYPKIEKIWACSVNGFCPKKNLIFETNLGASRERLFRITGLILPGMHGRTSTFAVNGYYSGLLMFCGKGALHFQFPLGSFPKFLKGLTHL

SEQ ID NO: 279346 - protein, 95 aa, Glycine max
  Clone ID: PAT_MRT3847_94271C.1.pep
GRVFFFDRGPFITQFFPLRFEPGPVQNESNPPPVVVDWPPQKKANFGFNLGPPKENKPLFLSPNFFKKKNCRKKGLRGVFFPPFFFWKINFPLKS

SEQ ID NO: 279347 - protein, 249 aa, Glycine max
  Clone ID: PAT_MRT3847_94272C.1.pep
MPDKGSNCSRTMAGTGFSTSCLSSSSNLGTCWLVLKTHNARAVPGKLPGTVRRRLSLIKAEVKYVNAEKAKELVEADGYTVLDVRDKTQFVRAHIKSCSHVPLFVENKDNDPGTIIKRQLHNNFSGLFFGLPFTKPNPEFVQSVKSQFPPESKLLVVCQEGLRSAAAASKLEEAGFENIACITSGLQTVKPGTFDSVGSTELENAGKAGLVTIQGKISTVLGTILVCAYIFVTFFPDQAEKLFQLAPTG

SEQ ID NO: 279348 - protein, 113 aa, Glycine max
  Clone ID: PAT_MRT3847_94273C.1.pep
EVKGFFFRFHENVRKYLGYWFAKTFFIFVFIFKNVTLFSLYFLYLFPVQAFENKKYYKISVIESENKNVLSNQMVLTFFFYNCQEVCFCVLLYFKHVPPQLLKQYSFCKVGDI

SEQ ID NO: 279349 - protein, 33 aa, Glycine max
  Clone ID: PAT_MRT3847_94274C.1.pep
FPGGEIKVNTELWIYRLVSQQSKRIIRLSMYMR

SEQ ID NO: 279350 - protein, 66 aa, Glycine max
  unsure (1)..(66): unsure at all Xaa locations
  Clone ID: PAT_MRT3847_94275C.1.pep
GSRDNPHVTRKQAPKKCYVNFXPRQSFDNIGEVSEQKEKPLNTDNTNCIKLAHTRTHTLECVRLIS

SEQ ID NO: 279351 - protein, 51 aa, Glycine max
  Clone ID: PAT_MRT3847_94276C.1.pep
PRLESGKSCDKDRRDKENFQRIYLISYSLKICYVLMPYLPLSWVNESSRGS

SEQ ID NO: 279352 - protein, 187 aa, Glycine max
  unsure (1)..(187): unsure at all Xaa locations
  Clone ID: PAT_MRT3847_94277C.1.pep
MFSNQVHVFRSPFRVLKYPRTKTPPNTRLFLLLLHANNNNNTNAGTSPTFLCSSLSDDSFSTPKPNQLGYNPSEELFGLEELKPSTANSHTPEPRSWFGPNGQYIRELPCPSCRGRGYTPCTGTECGIERSRPDCPKCYGKCSGDWHLWEESIDEQPWEVLSPLKVXEDDEVDAKFGKKNAAAPSPK

SEQ ID NO: 279353 - protein, 77 aa, Glycine max
  Clone ID: PAT_MRT3847_94278C.1.pep
TPAGTRPSRVDPRVRTQAVAPSLNRTSFPPGFIFGTASSAYQYEGAANEGGRGPSTWDAYSHKYPEKISDRSNGDVG

SEQ ID NO: 279354 - protein, 100 aa, Glycine max
  Clone ID: PAT_MRT3847_94279C.1.pep
FDTACANYAEYCRHYVWCVEATGSMELAPNVLAPTTQGYDKSHPEIPLTCARIMVPTADVYGAQSPYQLVHAGTTQALLEAIIKHADMESRLQKTQEALP

SEQ ID NO: 279355 - protein, 106 aa, Glycine max
  unsure (1)..(106): unsure at all Xaa locations
  Clone ID: PAT_MRT3847_9427C.1.pep
MDKGKTVRDGTMHHLTMAYALMLTSSSVTELSNWMNVPISEKHKELGTYDHDSLYVXTVWLAKRNYITSGQVVLALQMIXGSIKKAEDMAPHLYISTGAVAKHIQT

SEQ ID NO: 279356 - protein, 48 aa, Glycine max
  Clone ID: PAT_MRT3847_94280C.1.pep
LFEVIYKIDLMVKWIKWKDHEFKFISLTKFNKLTTNIFIDKKMTNYLF

SEQ ID NO: 279357 - protein, 93 aa, Glycine max
  unsure (1)..(93): unsure at all Xaa locations
  Clone ID: PAT_MRT3847_94281C.1.pep
LTLLLAADIHTGDEDFYHAVWPNTPIPXSLPNLLKPLPTTVHINDHPMQNHKTQHPKTFFYKXYLYPDLTFNVQFNKPSFQHPFRHPTWFKAI

SEQ ID NO: 279358 - protein, 58 aa, Glycine max
  Clone ID: PAT_MRT3847_94282C.1.pep
FFFSIRKILSFYSISSSVSLNTLLDVDFCKKQRSKPSFSFFIYGASIVPVLPHALLNV

SEQ ID NO: 279359 - protein, 93 aa, Glycine max
  unsure (1)..(93): unsure at all Xaa locations
  Clone ID: PAT_MRT3847_94283C.1.pep
MAKALSEIRMASQANTKSGHDCTAKDARGNEVNLADYKGEGLLFVNGGXQSGLANSYYTELNQLDQRHKGKGLEILGFPXKRLGAEEPPTNED

SEQ ID NO: 279360 - protein, 78 aa, Glycine max
  unsure (1)..(78): unsure at all Xaa locations
  Clone ID: PAT_MRT3847_94284C.1.pep
PLTCXXNNQTTSPSFHFXXYYLXFNXHSIXXIFLHFVLSSSXEFGXSGXGLKIXKLRHRANSLIGSRTXXMAXXFEGS

SEQ ID NO: 279361 - protein, 184 aa, Glycine max
  unsure (1)..(184): unsure at all Xaa locations
  Clone ID: PAT_MRT3847_94285C.1.pep
MMHKSSQKVSMSFFGPLYRNINKGYNLVFFIIGVSLGIAAVLCLKLSFSLQAFLYPVITPITTILPPPLSSSRLLSVTEQPPSTELKTSLMHSMTDQELFLKASSMVSGTQDFTQQAVPKVAFMFLARGPLPLAPLWEKFFKDHDGXYSIYLHQHPCYSETMPEDSVFYGRXIPSELVVWGHHH

SEQ ID NO: 279362 - protein, 76 aa, Glycine max
  unsure (1)..(76): unsure at all Xaa locations
  Clone ID: PAT_MRT3847_94286C.1.pep
LQRRGNAEVTGSGYSASLSRSRXARRGSAVKTTCQLIVFTCLFIFFYFFCLFFVFLFCFLFYIVFSFFFFFFGRRG

SEQ ID NO: 279363 - protein, 114 aa, Glycine max
  Clone ID: PAT_MRT3847_94287C.1.pep
KSPGFWGQTTGRFVLSPSKGSGPKFLFPGRFFFFGRPLVDGPPRPGPKSTRSVVAGFPDKDFFPLRGFSPGGSPRGGPPPGVGPGGGFAPPNQFPLIAPLVRPPVFTPFFFFFF

SEQ ID NO: 279364 - protein, 109 aa, Glycine max
  Clone ID: PAT_MRT3847_94288C.1.pep
TLEIMPGKKKTKKKIEKIGGKKIQAKRTNNTHQNLTPGNKGGDLRPFLPPVSARGSRKGAPRGREHARGNPHEPLRTPPRQTTPPTDPKKGGGKTMGPAVHSAGYKQPG

SEQ ID NO: 279365 - protein, 114 aa, Glycine max
  Clone ID: PAT_MRT3847_94289C.1.pep
PAKNGARVWLGTFETAENAALAYDRAAYRMRGSRALLNFPLRINSGEPEPVRVTAKRYSPEPSSSSSDSASSTKRRKKVVGSTVTAQSGLRKEQVGSQVAHSAHVESSCWSTNA

SEQ ID NO: 279366 - protein, 47 aa, Glycine max
  Clone ID: PAT_MRT3847_9428C.1.pep
TIFKIGHPNPIYFLHYLISSINIYSSSCYHFILTIKNDHLYNSITFH

SEQ ID NO: 279367 - protein, 60 aa, Glycine max
  Clone ID: PAT_MRT3847_94290C.1.pep
WKKTKTTLVFMGKKGGDNQNPNPHLQGLLDLLFLFPGESSLPPLLHWKRKENPPVFHHPG

SEQ ID NO: 279368 - protein, 98 aa, Glycine max
  unsure (1)..(98): unsure at all Xaa locations
  Clone ID: PAT_MRT3847_94291C.1.pep
VLLGSTGGFKPPFHSAQGASVXVRFIKADFPIGQDQCSLSHYXVERRAVLALGANHHSPVCVGPGYKXAVLVGFCNKATVQNTVFTSRSVPHQIALDV

SEQ ID NO: 279369 - protein, 142 aa, Glycine max
  unsure (1)..(142): unsure at all Xaa locations
  Clone ID: PAT_MRT3847_94292C.1.pep
MLDNLPPHRLLLSAAGWGSGNKQFRRRILLLLLVQAFFWGRSNSTFTDEEKARATHGFSNANLLVQGGXGYVHRGMLPNGEEVAVKQEKAASGQGEREFQAEGEIXSRVHHKHHVSLTGYCMTGTQRLIVHEFVASNTSEFH

SEQ ID NO: 279370 - protein, 275 aa, Glycine max
  Clone ID: PAT_MRT3847_94293C.1.pep
DAPIIRSVTEMQQLEFKLGPISANDYRAILVPLVKLYLRALLEDLPEKDAREKSDAVSEALLAELALDSKKAVKGGSESARHVEQTKDKKKNKDLRKARDFKVTSGHAHFSLGSTTPDSNLVAPESDFPDNEVVSMNDDDLEQLEEEFRRKIELEEEEKKLEETLEFQRRIENEAKQKQLAEQQKKSFGLYLEGVVPNLQDFETKGDAYPPDAHEHVGVPVQDQLVKENGSQSSLDGVLTPPANGSLDNYWPQSNSEQSSLPNGVVPENGLDRRA

SEQ ID NO: 279371 - protein, 67 aa, Glycine max
  Clone ID: PAT_MRT3847_94294C.1.pep
RVYSINYRKGQTSVYRRQSQQPSGPLPQAVRRQTQVFQIPPRKLLSGSSTRTLQDTQWFSFENHRKM

SEQ ID NO: 279372 - protein, 36 aa, Glycine max
  Clone ID: PAT_MRT3847_94295C.1.pep
ITNKSEILNFGNLEYMDEKTMSYMNIYSMNFQMQVN

SEQ ID NO: 279373 - protein, 260 aa, Glycine max
  unsure (1)..(260): unsure at all Xaa locations
  Clone ID: PAT_MRT3847_94296C.1.pep
LYTSLKSRRARSWLYGTGWFRSFIADYGVPFMVVVWTALSFIVPSKVPSGVPRRLTSPLAWESTSLHHWTVIKDMGEVSLAYIFAAFIPALMIAGLYFFDHSVASQMAQQKEFNLRKPSAYHYDILLLGLTTLLCGLIGLPPSNGVLPQSYMHNKSLAALKKQLIRRKMVKSAKESIRQKASKSEIYGKMQAVFIEMDSCPDNHLVVKELEDLKEVVLNGEDKGLNNKSTFDPEKHIDAYLPVRVKEQRVSNXLQSLLVE

SEQ ID NO: 279374 - protein, 105 aa, Glycine max
  unsure (1)..(105): unsure at all Xaa locations
  Clone ID: PAT_MRT3847_94297C.1.pep
TSCAACTGCAVKAVTRLPGIRVAIDCVLNILAHVLFDPSFVDVGTIREAVEDSRFDAEXLTDDVEYDQVCLIQIIGMSCRSCSYSLESVVQALDGVLETRVGLAT

SEQ ID NO: 279375 - protein, 49 aa, Glycine max
  Clone ID: PAT_MRT3847_94298C.1.pep
LIRLPTGEVHIKVSTISETGSDDNLTLAFMVTKRLHLHFADTLGSVGTY

SEQ ID NO: 279376 - protein, 59 aa, Glycine max
  Clone ID: PAT_MRT3847_94299C.1.pep
CTITKRIVVGRRWLGTENKLLWNFFSLQDVGQSILESYSRVMESLAFNIMARIDDVLYV

SEQ ID NO: 279377 - protein, 206 aa, Glycine max
  unsure (1)..(206): unsure at all Xaa locations
  Clone ID: PAT_MRT3847_9429C.1.pep
MPRYYCDYCDTYLTHDSPSVRKQHNAGYKHKANVRTYYQQFEEQQTQSLIDQRIKEHLGQAAAFQQVGVAYNHLMVQRPNLPPVLPPPRLPIPGNAQIPGGQPLMQGMRPPVFPRPPGAPGYVSAHTMPPMLPPPGAPQVPGQLNTIPRPPSLAPPPXLPGSTATPASNGAPSMVSSAMYQANPPAPSSGSYDNYNTSAQAPEGNH

SEQ ID NO: 279378 - protein, 45 aa, Glycine max
  unsure (1)..(45): unsure at all Xaa locations
  Clone ID: PAT_MRT3847_942C.1.pep
MTGLSRRCGSLTGLAPSSXKLATTSPLAQQQGRAEMITWNXSLSS

SEQ ID NO: 279379 - protein, 33 aa, Glycine max
  Clone ID: PAT_MRT3847_94300C.1.pep
GYCILELELRTSAGKNVHHDVMFSSIILFLKVV

SEQ ID NO: 279380 - protein, 148 aa, Glycine max
  unsure (1)..(148): unsure at all Xaa locations
  Clone ID: PAT_MRT3847_94301C.1.pep
VLALINLRCTSVNNNTXNEEKEGNNKVPLWERISQGMSELRYKRSAKRCKEKWENINKYFRKTKDITKKRSLDSRTCPYFHQLSSLYNQGKLVLQSESHLNNTPPDQNPEQVKPDQTTQAHESSSQVGSGSGFSVQQQQVPSLDFDQF

SEQ ID NO: 279381 - protein, 67 aa, Glycine max
  Clone ID: PAT_MRT3847_94302C.1.pep
ERASWAASTGTVNRSRRTIAAFSGIPKRKTFGQDIAAGMGMTKVGLIFTQTMTQDKKDHTQTISEAT

SEQ ID NO: 279382 - protein, 136 aa, Glycine max
  Clone ID: PAT_MRT3847_94303C.1.pep
YGCEKTTEGDCKQSQQQHTQTQRHEIAAAQKQNTKIPIRSSTTTKIQFPGRHRFPKCTRLLFLRPPYSVKHVPPRLGHVRRQNAPTAACRSGSQSPPLPPLQFCSGRRGWRQCGLQKAEAVAGNGGDGSGGGDISE

SEQ ID NO: 279383 - protein, 63 aa, Glycine max
  Clone ID: PAT_MRT3847_94304C.1.pep
LNGLVDPRLQTNYNLHEMIRMTTCAATCVRYSARLRPRMSQVCLRITESEDLCENKPCVSFYI

SEQ ID NO: 279384 - protein, 217 aa, Glycine max
  unsure (1)..(217): unsure at all Xaa locations
  Clone ID: PAT_MRT3847_94305C.1.pep
MVIILTGDSCPATLPLPLAAFTSLTITYKVDKASERFLNLAGQTLESLAAGCPWPCMPIVASLWTLKAKRWSDFLIFSASRTVFLHNSDAAVQLLKSCFTATLGMNSSPISSSGGVGALLGHGFKYHLCGGLCPVAPGILYLRAYGSIRDVVFLTEEIVSILMHSVREIVCSGLPRDRLDKLKAXIDGIKYGQXSLAASMTRVKLAAALGPFYMDIR

SEQ ID NO: 279385 - protein, 65 aa, Glycine max
  Clone ID: PAT_MRT3847_94306C.1.pep
MAESHHQIPTAFDPFADANANDSFAVSKEYVHIRVQQQNLMKSLTTLQGLKKEFNYNKILKYFNK

SEQ ID NO: 279386 - protein, 657 aa, Glycine max
  Clone ID: PAT_MRT3847_94307C.1.pep
LLSKITAAVGEVFGSCVPNISWTLTSGEEISAHAVFSNAFILLLKLWRFNRPPLEYGIGDVPTVGSQLTPEYLLLVRNSHLMSAGNIHKDRNRRRLSEIASLSSPNSVFVDSFPKLKVWYRQHQACIASTLSGLVHGTPFHQIVEGLLNMMFTKINRGSQTTITSGSSSSSGPANEDTSIGPKLPAWDILEAIPFVVDAALTACAHGRLSPRELATGLKDLADFLPASLATIISYFSAEVTRGVWKPVFMNGTDWPSPGANLLNVEGQIRKILAATGVDVPSLASGDSCPAILPLPLAAFTSLTITYKVDKTSERFLNLAGQTLESLAAGCPWPCMPIVASLWTLKAKRWSDLFGSSEKIRKSLHNSDAVVQLIKSCFTATLGMNSSPISSSGGVGALLGQGFKYHLCGGLCPVAPGILYLRAYRSIRDIVFLTEEIVSILMHSVREIVCSGLPRERLEKLKATKDGIKYGQASLAASMTRVKLAAALGASLVWISGGLMLVQLLIKETLPSWFISVHRLDQEEKSGGMVAMLGGYALAYFAVLCGAFAWGVDSSSSASKRRPKVLGTHMEFLASALDGKISLGCDSATWRAYVSGFVSLMVGCTPNWVLEVDVHVLKRLSNGLRQLNEEELALALLGVGGVGTMDAAAELIIDTEI

SEQ ID NO: 279387 - protein, 38 aa, Glycine max
  Clone ID: PAT_MRT3847_94308C.1.pep
LFKGDVEIKLSSNINRIVRLFHFRTTNFCILYHQYYSF

SEQ ID NO: 279388 - protein, 66 aa, Glycine max
  Clone ID: PAT_MRT3847_94309C.1.pep
EVLQFPHSKIELKCNFKVVFGCGSFNLVLDFLNKRAFSTTSSSFFLLDAQVFGFDFFSLATNCLIF

SEQ ID NO: 279389 - protein, 73 aa, Glycine max
  Clone ID: PAT_MRT3847_9430C.1.pep
TAIIGGRTLKPETEAIVTRFQESLNFFLLLCVRFLKGKKITLCAGHRLGESFSFALLVYVPNTLLLDIGLRVR

SEQ ID NO: 279390 - protein, 37 aa, Glycine max
  Clone ID: PAT_MRT3847_94310C.1.pep
YQKNSKNKLKGKVNAIFILLINLNDEKINDPCQFSNR

SEQ ID NO: 279391 - protein, 95 aa, Glycine max
  Clone ID: PAT_MRT3847_94311C.1.pep
KGFWENYKPPSKGFFLSIPRLKKFPNKGYSPLFPLNFGDYPKISSWELPPPPYLQAFSHLFEVFISLCPMGSNFPAKLIPKAFGYQFSPLAWNLN

SEQ ID NO: 279392 - protein, 70 aa, Glycine max
  Clone ID: PAT_MRT3847_94312C.1.pep
AIKSVTFQNSGPPLKFQHDRLSQPASELQLQRAMAEASLKCPYGIAIIWGLSAIVIIRGSSDTTTLRSGD

SEQ ID NO: 279393 - protein, 233 aa, Glycine max
  unsure (1)..(233): unsure at all Xaa locations
  Clone ID: PAT_MRT3847_94313C.1.pep
DGGSAAWNCFRGKCGWKGSTQAFAGSNSARTQLAPVKKIRKITEEELELEPLCDELVTYFSERLISKQTLERNGVKQRKYDDQIVIAFPYHQNGGLISCKYRDINKMFWQEANTEKIFYGLDDIVGHNDIIIVEGEMDKLAMEEAGFFNCVSVPDGAPPSVSSKEELPPHDKKETASINSPHYATRVILATDGDPPGQALAEELARRIGKEKXWRVRWPRKIRSDHCKDANEV

SEQ ID NO: 279394 - protein, 142 aa, Glycine max
  Clone ID: PAT_MRT3847_94314C.1.pep
GDPLQSTCRHALCASLHLSDNYDCEVPHQCDYEVQYADHYSSLGVLLHDVYTLNFTNGVQLKFCMALGCGYDQIFPDPSHHPLDGMLGLGRGKTSLTSQLNSQGLVRNVIGHCLSAQGGGYIFFGDVYDSFRLTWTPMSSRD

SEQ ID NO: 279395 - protein, 61 aa, Glycine max
  unsure (1)..(61): unsure at all Xaa locations
  Clone ID: PAT_MRT3847_94315C.1.pep
GARATEEVIMAKSNVEKGESKVLIQVFIVTSQMVGXYGKSQKFARVAIGGLGGNPFGGQQM

SEQ ID NO: 279396 - protein, 92 aa, Glycine max
  Clone ID: PAT_MRT3847_94316C.1.pep
QILAPMESIFFQSLSLAKIPKSQTSPLLNSPLLFHSNATSVAFSSVPYHHHHLLKCFLFRSKANEKQNLVGVLRASEAATTPTTNDAERWLL

SEQ ID NO: 279397 - protein, 151 aa, Glycine max
  unsure (1)..(151): unsure at all Xaa locations
  Clone ID: PAT_MRT3847_94317C.1.pep
MENPSDFIAGFELPTSSTDDYLKLKRLENKLANLDVMEEYLKMDMRNLEKELVHAQEEVKRIQSVPLIIGQFLEAVDYDHAIVGSTTGSNYYVRVLSILDRELLKAGCSVSLHKYSNALVDVLPPESDSSIQMLRADEKPDVVYSDXRGLD

SEQ ID NO: 279398 - protein, 72 aa, Glycine max
  unsure (1)..(72): unsure at all Xaa locations
  Clone ID: PAT_MRT3847_94318C.1.pep
LXXXXXXXXXXXASXXXSXCRPSLSXLYPYAXXTTXXSXXXDXSXIRRLNXSLLWXLXXXLEPNSELYVRVX

SEQ ID NO: 279399 - protein, 145 aa, Glycine max
  unsure (1)..(145): unsure at all Xaa locations
  Clone ID: PAT_MRT3847_94319C.1.pep
TPEVGRVSMMKTVSKHASSGIPWYGPNRVKYLGPFSGEPASYLTGEFPCDYGWDTAVLSADPXTLARNRELQVIHSWWAMLWALVCVLPGLLCANRVKCGEAVWVKAGSXMFSDGGRELFGNPSVVHAHSYLCMWATQVILMGAV

SEQ ID NO: 279400 - protein, 68 aa, Glycine max
  Clone ID: PAT_MRT3847_9431C.1.pep
LINRDHRMPHLKTGNKCNRYLISRIFQFLPTSWCTISLGKENDSLSWPQTSRIIFFSTLMLFAEHSPI

SEQ ID NO: 279401 - protein, 78 aa, Glycine max
  Clone ID: PAT_MRT3847_94320C.1.pep
ILAYFSLLTEPNWNNLSYFSIFFLFCFSPLWLQSHSLTLTYRSMSTVLEHANLKLKLHVCCSLCSCLEISDMNGHSSI

SEQ ID NO: 279402 - protein, 265 aa, Glycine max
  unsure (1)..(265): unsure at all Xaa locations
  Clone ID: PAT_MRT3847_94321C.1.pep
GSSESALINPSALVPDPWQVSSETLTSIDPEAVAVEPALVPCVQAYVDSVLDLASHFITRLRRYASFCRTLASHAVTAGTXNNRNVVASPAQCSATPATSQGGQNGTTSSSGSTQMQAWVQGAIAKISSTTDGVSNPVPNPPISGPSSFMPISINTGTFPGTPAVRLIGDCHFLHRLCQLLLFCFFFRRAQQPRYAGGVQRTADTNLQKPQPNASVPGKVEEIAKPVSTVVRPDDGQAGRVSQLVPASKGGEEPSPVRSRIGTGN

SEQ ID NO: 279403 - protein, 569 aa, Glycine max
  Clone ID: PAT_MRT3847_94322C.1.pep
MEALKTLFLAIFVVLASALYSANAKIQEHEFVIQATPVKRLCNTHSTITVNGQFPGPTLEVNNGDTLVVKVTNKARYNVTIHWHGIRQMRTGWADGPEFVTQCPIRPGESYTYRFTIQGQEGTLWWHAHSSWLRATVYGALIIHPREGEAYPFTKPKRETPILLGEWWDANPIDVVRQASQTGAAPNISDAYTINGQPGDLYKCSSQGTTIVPIDSGETNLLRVINAALNQPLFFTVANHKLTVVGADASYLKPFTTNVIMLGPGQTTDVLIQGDQPPTRYYMAARAYQSAQNAPFDNTTTTAILEYKSAPCPAKGSSIKPVMPSLPAYNDTNTVTAFSKSFRSPRKVEVPAEIDDNLFFTIGLGLNNCPKNFNANQCQGPNGTRFTASMNNVSFVLPNNVSILQAHHLGVQGVFTTDFPTQPPVKFDYTGNVSRSLWQPVQGTKVTKLKFGSRVQIVLQDTSIVTPENHPIHLHGYDFYIVAEGFGNFDPNKDTSKFNLVDPPMRNTVAVPVNGWAVIRFVADNPGAWIMHCHLDVHIGWGLAAVLLVDNGVGLLQSIEPPPEDLPLC

SEQ ID NO: 279404 - protein, 94 aa, Glycine max
  Clone ID: PAT_MRT3847_94323C.1.pep
PEELAERWAEAWADALGKYSPKPTKVDFFLETNGGWKEFFCLKHLKKVFFFPCFGFLWWVLSFRMVFRSPFWCGLKYVKVYNLVFFFKMFLNLG

SEQ ID NO: 279405 - protein, 310 aa, Glycine max
  unsure (1)..(310): unsure at all Xaa locations
  Clone ID: PAT_MRT3847_94324C.1.pep
QVEPSKLMNVTTVDRFLKYHVQGFEKMFKEKFPACSIAAKRHIDKTTTILDVHGVNWVSFSKVAHDLVMRMQKIDGDNYPETLNQMFIVNAGSGFKLLWNTAKXFLDPRTTAKIHVLGNKFQSRLLEIIDSSQLPDFLGGSCSCPNDGGCLRSNKGPWNDPDILKLLHSREAMKLTKFGSSSVADGVDVKSYASKVTSTGISEPLSASEVRLNPSAFVQSVPSSEKKRMRDSAPTGNVLEPLNAAREVVGDVDSISDSNNNHLRRLQEKPIPYIISILAQIAVKLLTCIYVVFAALGKCFVVRSVNNQPK

SEQ ID NO: 279406 - protein, 275 aa, Glycine max
  Clone ID: PAT_MRT3847_94326C.1.pep
KKTASEIDTLVAGWLEEHKRKRATSTNGKEEQDVMGVMLNVLQDLKVSGYDSDTIIKATCLNLILAGGDSIMVALTWALSLLLNNEIELKKAQDELDTQIGKDRKVEESDIKKLAYLQAIVKETMRLYPPSPVITLRAAMEECTFSCGYHIPAGTHLMVNAWKIHRDGRVWSEPNDFKPERFLTIHKDVDVKGQNYELVPFSSGRRACPGASLALRVVHLTLARLLHSFDVASPSNQVVDMTESFGLTNLKATPLEVLLTPRLDTKFYEDYIILS

SEQ ID NO: 279407 - protein, 89 aa, Glycine max
  Clone ID: PAT_MRT3847_94327C.1.pep
MLLRPCPSLSLLSNALSFGAHLPFHQQKTISTSVFALTEFDPRIMTEPIVSTEELNKPLPPNDKRNYMYLKPMLFDQTPVFYRDEIVHK

SEQ ID NO: 279408 - protein, 147 aa, Glycine max
  unsure (1)..(147): unsure at all Xaa locations
  Clone ID: PAT_MRT3847_94328C.1.pep
SLFFKKKKNFLKGFSPXFWRFFFFFKKKNQRLGLLKKKTLFPGVGGIFYKKPGGQFFSLYMARVWRALICGWALLFGPPGIPLFSSRLFFLWIFFRKTFFLPKKVCARFLASFLFPLLVKMGVPAVPALDLWCCTLPPFVFVFFFCI

SEQ ID NO: 279409 - protein, 99 aa, Glycine max
  unsure (1)..(99): unsure at all Xaa locations
  Clone ID: PAT_MRT3847_94329C.1.pep
ENNVNLLDRVSAWWARVGSNMLDRSDAVSKVAFESVGRLFQEFSSTRMSKLAGDKLVDSENSLAIRSNWVSSMVDFVWRKRXALMARSLILPVENFRAT

SEQ ID NO: 279410 - protein, 116 aa, Glycine max
  Clone ID: PAT_MRT3847_9432C.1.pep
ACCTRENYRSKHLHQSPSVIQIRPLRTAIRISEKKRVKERTDIEKSTLEVQYQIGEWEHLSKNFNSLNLKLSRELRKKQKKFKIYSVVLYQIGECSANKLRVVKKIIHKVCGQRRE

SEQ ID NO: 279411 - protein, 84 aa, Glycine max
  unsure (1)..(84): unsure at all Xaa locations
  Clone ID: PAT_MRT3847_94330C.1.pep
EKKEKLTNTTAPNFLFLTIAANLXNRQYGTHINAVVRACGPDFNTPLPSDFDLDSSSDDEEKTTTXSYLKVLIQKANAANEASL

SEQ ID NO: 279412 - protein, 44 aa, Glycine max
  Clone ID: PAT_MRT3847_94331C.1.pep
SFKNTQGFYKRSRTTIINPPLDRHKQQSLTTYPKIIFKAQDASH

SEQ ID NO: 279413 - protein, 237 aa, Glycine max
  unsure (1)..(237): unsure at all Xaa locations
  Clone ID: PAT_MRT3847_94332C.1.pep
DEVQTTGKHSSGLIVLPLYSGLSRAEQELVFSQAPRGKRKVIISTNIAETSLTLEGIVYVVDSGFSKQRFYNPISDIENLVVAPISRASARARADWARGKSSQWCHKNYVNYLAMRKVLEVREQLRRIAKRIGLVLKSCESNMQVVRKAVTAGXFANACHLEAYSHNGMYKTLRGXQEVYIHPSSVLFRVNPKWVIYNSLVSTDRQYMRNVITIDPSCLLEAAPHFYQLQQSNHLLR

SEQ ID NO: 279414 - protein, 347 aa, Glycine max
  Clone ID: PAT_MRT3847_94333C.1.pep
ERIVYVGDKFGSKQRFYNPISDIENLVVAPISRASARQRAGRAGRVRPGKCYRLYTEEYFLNHMSNEGIPEIQRSSMVSCVIQLKALGIDNILGFDWPASPSTEAMIRALEILYSLRVLDDDAKLTSPTGFQVAEIPLDPMVSKMIIAFSQLGCSEEIITIAAVLSVQSIWISGKGIQKESDEAKLRFAAAEGDHVTFLNVYKGFHQSGKSSQWCHKNYVNYHALSQVLEVREQLKRIAKRIGLVLKSCESDMQVVRKAVTAGFFANACHLEEYSHNGMYKTLRGSQEVYIHPSSVLFRVNPKWVIYNSLVSTDRQYMRNVITIDPSCLLEAAPHFYQLQQSNHLFR

SEQ ID NO: 279415 - protein, 54 aa, Glycine max
  Clone ID: PAT_MRT3847_94334C.1.pep
GHTLDAIGDAITQTCRNLNLQGDVRQRTCVLALYAACTMYSSCSMCRCTVQMTT

SEQ ID NO: 279416 - protein, 103 aa, Glycine max
  Clone ID: PAT_MRT3847_94335C.1.pep
PLIEIYLIYLSFYLSFQQSKFLKLTTGDKGVLNWKQRYDIILGTARGLAYLHEEFHVSIIHRDIKTANILLDDDLQPKIADFGLARLLPRDRSHLSTKFAGTL

SEQ ID NO: 279417 - protein, 73 aa, Glycine max
  Clone ID: PAT_MRT3847_94336C.1.pep
QGSCPCMSHRPLSVKVTNFMVREPMSVSSSVAAPSCLLQSEQQYPLKESVLQIHMLGSYPEPPSTVTVYSLLD

SEQ ID NO: 279418 - protein, 73 aa, Glycine max
  Clone ID: PAT_MRT3847_94337C.1.pep
VSQIIMVRSLWFMMMGLDCSSVCQMPCTRPVHFSFLISFKMLRIQGPGFSNCWSSTESKGCSKVGSNVRTGTC

SEQ ID NO: 279419 - protein, 331 aa, Glycine max
  Clone ID: PAT_MRT3847_94338C.1.pep
MGSTNANNETVAEIPEWIRVFKDGTVERPLDFPIVPPTLNTGLSSKDITISHHPPKPISARIYLPNITNSQTKKLPIYVYFHGGGFFFESAFSKLFNDHFLKLVPQANIIVVSVEYRLAPEHPLPAAYDDCWDALKWVASHSTKDTTPNNTESWLTEHGDFNRVFIGGDSAGANIVHNILSFRVGPEPLPGDVQILGSILAHPYFYGSEPVGSEPVTGLEQNFFNLVWKLVYPSAPGGIDNPFINPLGAGAPSLAELACSRMLVCVAEKDGLRDRGVWYYEAVKKSGWKGEIQLFEEKDEDHVYHLLKPALNQDSHKADALIKLMASFLVN

SEQ ID NO: 279420 - protein, 61 aa, Glycine max
  Clone ID: PAT_MRT3847_94339C.1.pep
YLESFHTCLTPATNKKCAQKAFFENILCSSRNYVYNWLCRYTSNFLGSVATWNVIAFMYPL

SEQ ID NO: 279421 - protein, 66 aa, Glycine max
  Clone ID: PAT_MRT3847_9433C.1.pep
FQESSIFFLLLGVRFLKGKKTTLCAGHRLCESFSFPLLVYLLNTLLFDIGLRVRFKLFLFFFQFFA

SEQ ID NO: 279422 - protein, 122 aa, Glycine max
  unsure (1)..(122): unsure at all Xaa locations
  Clone ID: PAT_MRT3847_94340C.1.pep
MMADDILNVLPNGXPGPFATEMIVLDRHGLQLDVDQIPAFGXHAGHLTTRGSVDVPNITIXFDTKRSSELFTADDLPVVHAHGEPFSQPICHRHNLYRHLEPVLRYDEHTPLYCTHSFKILF

SEQ ID NO: 279423 - protein, 59 aa, Glycine max
  Clone ID: PAT_MRT3847_94341C.1.pep
FFCQSTKKKTGGFFKHFLLRGKSNLGFAENLPCFRGHLGNFTPFPFIQKGFLGQGQKKK

SEQ ID NO: 279424 - protein, 101 aa, Glycine max
  unsure (1)..(101): unsure at all Xaa locations
  Clone ID: PAT_MRT3847_94342C.1.pep
HTERXDXTMXEGTXRNNLDXLEEYTDEQIWEALDKCQLGDEVRXKEGKLDSTVSENGENWXSMGQRQLVCLGRVLLKKSKVLVLDEATASVDTATDNLIQQ

SEQ ID NO: 279425 - protein, 82 aa, Glycine max
  Clone ID: PAT_MRT3847_94343C.1.pep
VSNGNFHGYNLICILLSSIRNHSRYSSISSSISSPHRSQFSPHILSLSFIYIYRSSEAIIEAFIEAIILRNIKSHTTSSNIL

SEQ ID NO: 279426 - protein, 70 aa, Glycine max
  Clone ID: PAT_MRT3847_94344C.1.pep
TKLQKNHLTRPKTHYHQKMVFFEPTSCVSHKIKSWLIFNLLGCFIQRRLSSARALNACQTNWGNPEGRTY

SEQ ID NO: 279427 - protein, 57 aa, Glycine max
  Clone ID: PAT_MRT3847_94345C.1.pep
TGAMTAHKSVGGLARTFLGTAQLSKVGFDWGSSKTHFSKATPHIMDRSANLSCKEIE

SEQ ID NO: 279428 - protein, 206 aa, Glycine max
  Clone ID: PAT_MRT3847_94346C.1.pep
MASPNNHNSPPPIPFDMHSFFNPQPPSSSNPNPNPNPSSSFPPPFSPAPFHFPNFDLPLQHQHQHQHQHQHRSISFPTQPIPPPSNPNAGARLMALLGNPSPTPPQPPPPEFVPASSSSSPSSSAILAAASAAAAALTRLPSSKVPKGRRLVGEHVAYDVDVRLPGEVQPQLEVAPITKYGSDPNPVLGRQIAVNKSYICYGLKQG

SEQ ID NO: 279429 - protein, 77 aa, Glycine max
  unsure (1)..(77): unsure at all Xaa locations
  Clone ID: PAT_MRT3847_94347C.1.pep
SLFSSHSSADLNQHWFDTSSYQHRAEACXGLMEFSARLFHQKRFDXLGVFLNPFGPEKVSPRETPIWLVKSFKQTAV

SEQ ID NO: 279430 - protein, 77 aa, Glycine max
  Clone ID: PAT_MRT3847_94348C.1.pep
RGLPKSCLSCGTIISWCCNPWSSSFGFGNYLKNQIRVTIIWVGISNYELAYNGSLSKSNTYNMMKFEPKILGKLFKS

SEQ ID NO: 279431 - protein, 59 aa, Glycine max
  Clone ID: PAT_MRT3847_94349C.1.pep
IRETTLHTWLDYQDLHTGDELLLYYFRYTEIDNGMLWEEHDKYHALEALDVDIDAYPEC

SEQ ID NO: 279432 - protein, 93 aa, Glycine max
  unsure (1)..(93): unsure at all Xaa locations
  Clone ID: PAT_MRT3847_9434C.1.pep
TNVATAERMGKAAHKQGASMSPNKETXEGYDNWPAQKEGSTPRAGRRADHSTSLRMHQLVKESGEAIPITRILEANNAHYHXNSMINADRTDL

SEQ ID NO: 279433 - protein, 109 aa, Glycine max
  Clone ID: PAT_MRT3847_94350C.1.pep
TLIFSLCSFSLHLDGSLSKHYRSLEGLVLRDPHRGFGIEVWPFLVCCFEGFSTVVLGFNPFCNIEVSVNVLKNLGKLSALWCSNLELSCTLLALKNEEPPPSSSASAQF

SEQ ID NO: 279434 - protein, 70 aa, Glycine max
  Clone ID: PAT_MRT3847_94351C.1.pep
LRRKKKKKRRGFFMPYFLPIKGFFLFPLLGPSRAKSCKAPALFSFTIGQRGRFVKLQIGSSAAFEEVMFP

SEQ ID NO: 279435 - protein, 37 aa, Glycine max
  Clone ID: PAT_MRT3847_94352C.1.pep
RCLGRKNSVYNDIPKALFCRQEEEERKIVPPCVVLWV

SEQ ID NO: 279436 - protein, 62 aa, Glycine max
  Clone ID: PAT_MRT3847_94353C.1.pep
KKKKNSTTIAAMLPFFGDINSLIGAFGFIPLDFILPMVFYNLTFKPSKRSPVFWLNVIIVVA

SEQ ID NO: 279437 - protein, 72 aa, Glycine max
  unsure (1)..(72): unsure at all Xaa locations
  Clone ID: PAT_MRT3847_94354C.1.pep
KEARRNEGRRLVHIVLQSKNNKQIKGVVRXEELRIINXNSLSWHNLKYKSIQISILGVIICYTKAFGQHKLF

SEQ ID NO: 279438 - protein, 62 aa, Glycine max
  unsure (1)..(62): unsure at all Xaa locations
  Clone ID: PAT_MRT3847_94355C.1.pep
KEEERTXKKKGAVDIDHQWSLAAASDEVIRSYMVXAGCTRYEWXSEEARNXPXXLXFMSIIQ

SEQ ID NO: 279439 - protein, 66 aa, Glycine max
  Clone ID: PAT_MRT3847_94356C.1.pep
KFGFNNQIGQIGVLLISPSGSRSKEHGLYGCTLPFQNLSLTPPKFKFHPFSVSVVFSQPSSRFGSS

SEQ ID NO: 279440 - protein, 127 aa, Glycine max
  unsure (1)..(127): unsure at all Xaa locations
  Clone ID: PAT_MRT3847_94357C.1.pep
SCGIVFYAANLSCDSKFPTRSEKVTSTKAQLDWGETFNINITAAGLHSSKHIADKVDQEKSIKTDAXLRQIIYPQYNEVKAXMETNMLKVSFEDVGTYXGYMLDDKMSXSKNALSKNTVGGTILRSD

SEQ ID NO: 279441 - protein, 104 aa, Glycine max
  Clone ID: PAT_MRT3847_94358C.1.pep
IGPKRTPWKTKGKIPNDFFGKSQPPLILFNKKFGCGTHNTDSYSHLFFKTTPTFIDQNLWFEKWGLFWGPLTRWELPLGGPKIVLWLTLGFTKRGYRAFLNFFF

SEQ ID NO: 279442 - protein, 386 aa, Glycine max
  unsure (1)..(386): unsure at all Xaa locations
  Clone ID: PAT_MRT3847_94359C.1.pep
MECCKRVYEWLCNSKSYLIILSLQFGSAGMYLITMDALNKGMSHYVFVVYRNVIATIALGPFAFFLERKVRPKMTVRIFSEIMAVAFVEIILDQCFTFLGMKYTSASFASAVMNSVPSITFVLAIIFRLESMNLKELGCLAKVIGTAVSLGGAFLMALYKGXPVVNIADSSASHVGRPDNVNDPSGSHWLIIGACFLIRCAGFSAFYILQAITLRKYPAEMMSLARGVCFVGALQSSAVSFFMERNSHDVWSLAWDSRLVAYAYSVVTSAIQFYVQGMVIITTGPVLVAAFNPPRRIIVAALACIVLSEKLHLGSIIGGVVVVIGLYLVVWGKAKEQKHLMPPSPEKVTLQRHQQLPVTVPISDDANDNNKPQLVIIEDRNIGPEH

SEQ ID NO: 279443 - protein, 134 aa, Glycine max
  Clone ID: PAT_MRT3847_9435C.1.pep
IMRCHLLEYVFSISFARGMRKLEIIEIREAPELRHVFGQNIHSSQQYQSKFQIEFPVLERVTLHSTPNMIGIFPENYSATCSSLQLLVMNNIGLSTLSINNLKVDLEATHSDHSSKTDSRVVSMTTKQKLASVI

SEQ ID NO: 279444 - protein, 127 aa, Glycine max
  Clone ID: PAT_MRT3847_94360C.1.pep
RPSTSRGTQRLYVRLNTLHYLVTQIHSLEKTLSMNSGVVPSNRLRFASNRKSWCSYFETGNLAILGACQHVSEGAAYRLTFHDSSSLLSDSLYVGGVGRGDIRAAWGVLEQKRTLMTTILTDRAQPL

SEQ ID NO: 279445 - protein, 126 aa, Glycine max
  unsure (1)..(126): unsure at all Xaa locations
  Clone ID: PAT_MRT3847_94361C.1.pep
PLVRIGKTTMAKAIYNKIGRNFEVKSFLASIREVWGQDAGQVYLQEQLIFDIGKETNTXIRNVDSGKVMLKERLRNKRALLILGDVNNLHQLNVLCGSREWFGSGSRIIITTXDLHILIGRRVDKV

SEQ ID NO: 279446 - protein, 76 aa, Glycine max
  unsure (1)..(76): unsure at all Xaa locations
  Clone ID: PAT_MRT3847_94362C.1.pep
HHYHTRFLLFFIPFPDATAYHSGAGALVYELVNVQEGXGSKSLSSVQGLDKEVTSNKILIDHLNEVCFSETSVQDP

SEQ ID NO: 279447 - protein, 105 aa, Glycine max
  Clone ID: PAT_MRT3847_94363C.1.pep
VPIVKPIPKSIPKPVPIVKPIPISIFKPIPKPFPLVTKPLPIPIIKPIPESVPLVKPIPIPVFEPIPKPFPMVKKPLPISIFKPIPKSFPVGKMPQPVQVSKPIP

SEQ ID NO: 279448 - protein, 91 aa, Glycine max
  Clone ID: PAT_MRT3847_94364C.1.pep
MTKLTNLIGIIKDKASQSKAALLSKRTTLSLLRATSHDSSTPPTRKHLATLLSSGDGSRATASAAVEVLMDRLQGTNNAAVALKCLIAVHH

SEQ ID NO: 279449 - protein, 70 aa, Glycine max
  Clone ID: PAT_MRT3847_94365C.1.pep
MDPYKLRPFSAFNSPFWTTNSGAPVWNNNSSLTGGARGPIHLEDSYLVAKLANFDREPIPQRVVHARGAS

SEQ ID NO: 279450 - protein, 64 aa, Glycine max
  Clone ID: PAT_MRT3847_94366C.1.pep
TNHIYVSFSFDKMSINIYTPKYFFPFIYIHRYTHMILIKIYNYIKASIDTRSQIFTLMSLNNFF

SEQ ID NO: 279451 - protein, 106 aa, Glycine max
  unsure (1)..(106): unsure at all Xaa locations
  Clone ID: PAT_MRT3847_94367C.1.pep
EPGRPTVADFLPIFRLLDPQGGRIKKNGYYGKLIAIPEGLIDERLLLMAWEYESKACLEEXDTVPKLMLEENSQGTRPHVKHFFVALFGAGIDXPSSTMKRAMADL

SEQ ID NO: 279452 - protein, 153 aa, Glycine max
  Clone ID: PAT_MRT3847_94368C.1.pep
KERDFFFQQNLDYLGLNILNKTTALTCFCLSPTRSNPNKQKIFFTKILSHSEYSSVITRRCFLGGEKKRDPRGGGNWNLPYKISHKHGNSPCIWGNTNRTRKIQSQRRGISLAFLVNNKRGVSIKPLTGDFMFRAIKPTRDLIRDLGAKIIPT

SEQ ID NO: 279453 - protein, 43 aa, Glycine max
  Clone ID: PAT_MRT3847_94369C.1.pep
LALGVGVPWGVLTRSVIFVEGRFGIFPPFLRTIVMFKGCEMPL

SEQ ID NO: 279454 - protein, 124 aa, Glycine max
  unsure (1)..(124): unsure at all Xaa locations
  Clone ID: PAT_MRT3847_9436C.1.pep
AALVFVDAPSGGWRPIWVDTFPNTIVQIEPDMNSRFQLLRSTTNGDFVQGKDLAIGXVNAACAAVGLTSSYTPTSLLESGLQKDRGSIGEYSGRMPYSAHNVNQAQEKDXLLEGKLSFDIKILL

SEQ ID NO: 279455 - protein, 80 aa, Glycine max
  unsure (1)..(80): unsure at all Xaa locations
  Clone ID: PAT_MRT3847_94370C.1.pep
ALLPFMSLSLSSYDYFLPFSSLXLCSLXLFARYSLQLPDSAHPIIMATAFLRCCSRGVPILPLLPISYQSPYFGAAFNKA

SEQ ID NO: 279456 - protein, 95 aa, Glycine max
  Clone ID: PAT_MRT3847_94371C.1.pep
SRFYSVFCSTHTSSNLHLILSHQPITKTITTLTNLPRTTSTSIIQINNPTNTIISVPSVPSHTSTPYTTLYHYAQNLNCMTHALNGNLFVNLTVH

SEQ ID NO: 279457 - protein, 126 aa, Glycine max
  Clone ID: PAT_MRT3847_94372C.1.pep
KKTPLYKRRGPKAQMNIQPNFFLKTPFFPNTVLIFLTIVYKNIITKNLTMKGYGKIFSKIKSYNLKKLQKNGFSNFGGKDFLQLIIRMVNNSFQILIFKIYFKSFTLLNHFLKGYFIKRHFYSKTF

SEQ ID NO: 279458 - protein, 352 aa, Glycine max
  unsure (1)..(352): unsure at all Xaa locations
  Clone ID: PAT_MRT3847_94373C.1.pep
MLKAFPFVSNSYRPITATLLSLSHTTSKLETHLVTCEYPAICFSLSFTHQVLFPRENRHLCLEDTLCVLVCCRRKIATFAVLEGGFVGGYSGVRAFCDAMPEKVVISPQWALWSILMLHWRVGLLTALVLVGMVVVWSIDGCTVKNIIQAWRYQQDYLAVRSHTPNLTLTFVSPYSPVYGKKSLLVEGHASWVSNELEPNLTSNLIARWSARGGEPCKDSKAVEIAIPWLDGGEVVDLSAGYVHEFGFQALDDSEKPLCVGGDYFEADLSGESWKSRPLVKDFSNGSYLISLQVHPDFDGVYNLTIILLYRHFEGLKFTPWRFSYDQMLRSVAIRFYISSGRLPELXGCKAS

SEQ ID NO: 279459 - protein, 56 aa, Glycine max
  Clone ID: PAT_MRT3847_94374C.1.pep
IVIVMVMSNTNKMILMVFVKDYVCKMIRMMIFLLIIIVNSSNGMVLHQENKKCYFV

SEQ ID NO: 279460 - protein, 44 aa, Glycine max
  Clone ID: PAT_MRT3847_94375C.1.pep
IYTFRYLWHYFKGLPTQITNPWVLGLMGHIISNHYIVGRNPYLT

SEQ ID NO: 279461 - protein, 58 aa, Glycine max
  Clone ID: PAT_MRT3847_94376C.1.pep
GGGLHKEILLHINESMKRKSYATFLLNGQIRIKCLNIYTPIGIHTICLQLIFFTHDSH

SEQ ID NO: 279462 - protein, 52 aa, Glycine max
  Clone ID: PAT_MRT3847_94377C.1.pep
ARRVNSESSSRAAQMCPDLMQYIIQRVAVISGDNKRNNVPVILSACLSKKIY

SEQ ID NO: 279463 - protein, 87 aa, Glycine max
  unsure (1)..(87): unsure at all Xaa locations
  Clone ID: PAT_MRT3847_94378C.1.pep
KIKKKKKKKRKRKNKKKDKGNKKKNRGGRFHGSRLPFACILQLSFSIGSPTFTLLAVLLQRPVWXTPCVSQLFRLASLPPFPCLCYF

SEQ ID NO: 279464 - protein, 102 aa, Glycine max
  Clone ID: PAT_MRT3847_94379C.1.pep
RQTIFVTTLLCAVIERLKLVVQKGMSVIGAYSHFLYGEVYQKDQQCPQYLVSGRGYLFSHKSSCGSIWVGSRKSEGKIKRRNLRVEAMWPDLSRPNELEMEE

SEQ ID NO: 279465 - protein, 53 aa, Glycine max
  Clone ID: PAT_MRT3847_9437C.1.pep
TARKNLSPLCEIKTKKGNQSAPKVLCGQKNNGFLKKINERSRVLMAGKENVSP

SEQ ID NO: 279466 - protein, 100 aa, Glycine max
  Clone ID: PAT_MRT3847_94380C.1.pep
YHSTNPIKLFTYSISIIEFLSLSQSFLKFQLDKIFRKFFIFFSHYTQYHLYSLWKSNLHLIHNSFFFNILRFRISSVHNLPYAYFFPHFFSREKSAYFHI

SEQ ID NO: 279467 - protein, 70 aa, Glycine max
  Clone ID: PAT_MRT3847_94381C.1.pep
VFPPLFLPPLSLKNRVPDRRGALFPGGPAPGVFGHPFGFKFSLPKPKSFEGSFVNKIFGGNPGGGGGPHP

SEQ ID NO: 279468 - protein, 56 aa, Glycine max
  Clone ID: PAT_MRT3847_94382C.1.pep
THASTISRAAKERTSASSHCVGVNNAKTGVVINRQKTTRLESRKHWNWSLNSWPRG

SEQ ID NO: 279469 - protein, 42 aa, Glycine max
  Clone ID: PAT_MRT3847_94383C.1.pep
LFSPPKSLTSKSHQHTKLLHKYQLQFLPKPNIHLHLHKNIHH

SEQ ID NO: 279470 - protein, 68 aa, Glycine max
  Clone ID: PAT_MRT3847_94384C.1.pep
VIQSFSVRIPLPINEPQVVPLVFTIQSWSKDMNFCAGYSSSRSLFTSSLDSDQVQYMNQCSRFNISNR

SEQ ID NO: 279471 - protein, 69 aa, Glycine max
  Clone ID: PAT_MRT3847_94385C.1.pep
IIRRHIKRSVRSSLGPQITRLRNRIEHRKNVPLWYKGGERNPRIEGLYSSLDDGYGQWGKTHPKIASLS

SEQ ID NO: 279472 - protein, 116 aa, Glycine max
  unsure (1)..(116): unsure at all Xaa locations
  Clone ID: PAT_MRT3847_94386C.1.pep
MAERAKPIDFELTLKPFYQRASEAXERLSRLEAALNSKKGTGNEENLKVINDLQSKLEVANVELISEKEKAQMLVAENAKLQYRIIHLLRALKEADLKLEKATVHEQLQSMKLQGS

SEQ ID NO: 279473 - protein, 56 aa, Glycine max
  unsure (1)..(56): unsure at all Xaa locations
  Clone ID: PAT_MRT3847_94387C.1.pep
IVFFXNLYQHWYKVFNIKNTDLFLSNILNTYKTNIFLKNIIDFILKIKIQTWNRIT

SEQ ID NO: 279474 - protein, 84 aa, Glycine max
  Clone ID: PAT_MRT3847_94388C.1.pep
ISNASLYLKQEIFKNKKTIYCQDFLLCLALSVFCINSWTNCSISISQGRGQKRSHQNNLVSTLKRWMYLLKCTLCTPTTFIIRN

SEQ ID NO: 279475 - protein, 353 aa, Glycine max
  Clone ID: PAT_MRT3847_94389C.1.pep
DLHFWVLVLDTNLFTYQGFAFIYMEDERDAEAAIRALDRVEFGRKGRRLRVEWTKHERGVRKPASSRRSSANGRPSKTLFVINFDTYHTRTRDLERHFEPYGKIVSVRIRRNFAFVQYESEDDASRALEATNMSKLLDRVISVEFAVKDDDDRRNGYSPERGRDRHRDRSRDGRRSPSPYRRERGSPDYGRGPSPYQRERGSPDYGRDRDRSRSRSPPRRERASPAYGRRSLSPHRREREGSEPVRDSSRSPYHKERGRTDHGISPSQSPEGRGKKSPQNGHGSSRSPHDTGKTSPENGLGSGSPDEKGNPSPYNGYGGSPNNMPDPRDSPNYGGPESPMHERYRSQSPPAEE

SEQ ID NO: 279476 - protein, 136 aa, Glycine max
  unsure (1)..(136): unsure at all Xaa locations
  Clone ID: PAT_MRT3847_9438C.1.pep
TPLNFDSSKQSFXQFSIDLLGGGIAAVKTGDWITLIQNSXISNLMRVADWKKGCLMVKIVMSGNAADNRSDWTSLVQVFLTNSNSTEHFDACKWTKWEPHSWELIFPIEVCGANKGSEXWSSEWAYHTSWHLSFLI

SEQ ID NO: 279477 - protein, 79 aa, Glycine max
  Clone ID: PAT_MRT3847_94390C.1.pep
LRNVYPPAEEYVNHADKSHITLVEAFRSMQIEEGEEHLENGDSTHELTERNGEEHYTCSSSFGGRRAVVCATWAPRWRE

SEQ ID NO: 279478 - protein, 116 aa, Glycine max
  Clone ID: PAT_MRT3847_94391C.1.pep
TKIYQFFFPPNLAWPPFNPFIFIVQGEKTGPPNWVFSSNGPFFKKKAQPGTRVASPRKTFPSKGWALEPRGPLGDLPNSTGQKTKPLSLYLGKAGPQGLGPTLIKILFQGESWKGP

SEQ ID NO: 279479 - protein, 206 aa, Glycine max
  unsure (1)..(206): unsure at all Xaa locations
  Clone ID: PAT_MRT3847_94392C.1.pep
MSGVSLAVSHPPASVGEQNVPQAGTKPKPRTEQAPIGGMMGSLRVIELQLVAFILVFSASGLVPLLDLVFPALASAYILALSLFAFPSSSSSSTRSLHDSGTEIFKGGRLFRMYVVVGITVGLFLPLAYVLGGFARGDEHAVRSATPHLFLLSFQILTENIIGGLSMFSPPVRALVPMIYTVRRIFVDIDWIHDVWLNKTLXVNAT

SEQ ID NO: 279480 - protein, 136 aa, Glycine max
  Clone ID: PAT_MRT3847_94393C.1.pep
YTVHLRRRKPLNKWRLAGTAKQISRPLQLMTAYWASHYRPANSKQPAVINPGSCKIHSRYHLFGHGLSPPSHLYTGHPRTCSRSICGQRFTLSSWFDIRGSFFLPVAIIAPPPPPPPPPPKEGGRHTVMTGNLPGS

SEQ ID NO: 279481 - protein, 60 aa, Glycine max
  unsure (1)..(60): unsure at all Xaa locations
  Clone ID: PAT_MRT3847_94394C.1.pep
LDEPHNTVFAGTFVSVPHSXRSPYPRKNVLVXRSGLTNMLEALGAVFHYSVLVPLVPQYG

SEQ ID NO: 279482 - protein, 159 aa, Glycine max
  Clone ID: PAT_MRT3847_94395C.1.pep
DPRLKNAKKICLLLNFMQQVQRSDFSSQCTFQHSKGHIVTFKLGNTSRTLKSKTPLKKRQNPFEFERKTAMKPKSNTYLLDLLAQISIAHLQILQLPPQPKNLRILGTVLRLQLPQKCLFGHNFSHQRGERAALNLAFLQCFCAYSRISAPKQHQTASS

SEQ ID NO: 279483 - protein, 76 aa, Glycine max
  Clone ID: PAT_MRT3847_94396C.1.pep
ISMILRSDSHILCPLHVRKQLEVVLSIQNSQFRRFQPSMIYAEGYAWPASLKYILSCVSVASILSPHLQYFFPSWP

SEQ ID NO: 279484 - protein, 38 aa, Glycine max
  unsure (1)..(38): unsure at all Xaa locations
  Clone ID: PAT_MRT3847_94397C.1.pep
QXPLRPNPXXSXEAXVXGEIXQVACLFXCGRNNSXPQP

SEQ ID NO: 279485 - protein, 90 aa, Glycine max
  Clone ID: PAT_MRT3847_94398C.1.pep
GFRPTAGAAIASHEDVDKVAFTGSTEIGRVIQVADGSSNLKRVTLELGGKSPNIIMSDADMDWAVEQAHFALFFNQGQCCCAGSRTFVQE

SEQ ID NO: 279486 - protein, 88 aa, Glycine max
  Clone ID: PAT_MRT3847_94399C.1.pep
KEFKVLSSRGEKGHTICGYLNGTAGLSLMKQKPALPYFGTNIKKCSVDGQTEIAFDTRGPTPKVAYVVVQLLLRDEPHGIYFLKTWTT

SEQ ID NO: 279487 - protein, 181 aa, Glycine max
  unsure (1)..(181): unsure at all Xaa locations
  Clone ID: PAT_MRT3847_9439C.1.pep
LIVLSKNTVGGTILRSDLLANFLTEGNFRASVDLQRTYRIKGMIKMVATVGIPENTGIAMACAMNSSFRGRASSDIYTICSQDWELWKPACTKAMTMLFNPNPCADAWSLEFLKRTGYQCEILXVTGWTRTPMQDVQDTNDWFISXSKMGSRTYCVLKYNNPFWLNKGVGKYDFPMVLSRM

SEQ ID NO: 279488 - protein, 196 aa, Glycine max
  Clone ID: PAT_MRT3847_943C.1.pep
MAFAGTTQKCMACDKTVYLVDKLTADNRVFHKACFRCHHCKGTLKLSNYNSFEGVLYCKPHFDQLFKRTGSLDKSFEGTPKIAKPEKNLEEKPAAAKVSSMFGGSREKCAGCQKTVYPTEKVTVNGTPYHKSCFKCCHGGCVISPSNYIAHEGKLYCKHHHVQLIKEKGNLTQLEGDNEKSATNGKINGEEVSAET

SEQ ID NO: 279489 - protein, 90 aa, Glycine max
  unsure (1)..(90): unsure at all Xaa locations
  Clone ID: PAT_MRT3847_94400C.1.pep
LNEEQISEFKGTLNLVEKGREGWNKTKGPGNGKPSMGEKPNEGKTQEHDKEMDADGNGXIDXPEFLNLMARKMKDTDSEEELKEAFRVFD

SEQ ID NO: 279490 - protein, 71 aa, Glycine max
  unsure (1)..(71): unsure at all Xaa locations
  Clone ID: PAT_MRT3847_94401C.1.pep
TVMGVAGAKSKCSTVRIQXIAWDLTSGMIFDVGYCTAXGVSGGHMDPAVTFRHPVARKLSFPRAIFYIVMQ

SEQ ID NO: 279491 - protein, 74 aa, Glycine max
  Clone ID: PAT_MRT3847_94402C.1.pep
MAGPFELGSSMKVPADCVNDLRTFRADNMHSSMTIIYYSRTFLSKIGELVAGILGFTSLLRFVIYFLLMMGTSL

SEQ ID NO: 279492 - protein, 92 aa, Glycine max
  Clone ID: PAT_MRT3847_94403C.1.pep
LYHGPLASPPWGWVGTSLESQTPFLIFGGGPRQCPGKELGIPKISPFFPSFVTKNRWEKVGGGTLIKFPRVVAPKGLPIRVSPSYLGFGQAQ

SEQ ID NO: 279493 - protein, 53 aa, Glycine max
  Clone ID: PAT_MRT3847_94404C.1.pep
CRYRYSSRPIYLIPFVWTKISLYVCVVVSKSITPIRKLGSVPSVIPCVCCEIK

SEQ ID NO: 279494 - protein, 42 aa, Glycine max
  Clone ID: PAT_MRT3847_94405C.1.pep
KSLGDKSNVGETISKGLLNLKPNREKVGAALLQEVVDRRNKD

SEQ ID NO: 279495 - protein, 116 aa, Glycine max
  Clone ID: PAT_MRT3847_94406C.1.pep
AFCNGQLEHGHFGLEKEKRTAASRIQRKTKGNFFKEQRKKGGETPLAKKKERGRGGGNQRGGGGKTQNKVYPEKKTIGTNPPPKKNQTGGPPFWGGGGKKKTTPAFLKKRGGATKK

SEQ ID NO: 279496 - protein, 88 aa, Glycine max
  Clone ID: PAT_MRT3847_94407C.1.pep
FSSLYIHLFLYYNSYHPTSSHILYFTSYKIILQFPLTFILQITFLYHQLHSSNNTPLLLLLTHPYSKFPPIYHSNIHPTYLSFYFPPY

SEQ ID NO: 279497 - protein, 78 aa, Glycine max
  unsure (1)..(78): unsure at all Xaa locations
  Clone ID: PAT_MRT3847_94408C.1.pep
TNTIQSLSTNQFHGIGYKQDCPISNEKPIVGSGKSAFFFFLSPLTXXGTGLTMPIINLVMTIIITMAILMTIIRTTFM

SEQ ID NO: 279498 - protein, 46 aa, Glycine max
  Clone ID: PAT_MRT3847_94409C.1.pep
SSRASQQRRRLCPDYRYLTLRSRGGKPSVRVARTGDTAPALAGGPP

SEQ ID NO: 279499 - protein, 89 aa, Glycine max
  Clone ID: PAT_MRT3847_9440C.1.pep
LDPYRLQIGLDCESLARILAHITLHATLSHLTGTPNPVNLSPTKRNSKAAILLISTKVGDSVIKTTTIRAAHLLDSTMQFGDYYCYVHW

SEQ ID NO: 279500 - protein, 68 aa, Glycine max
  Clone ID: PAT_MRT3847_94410C.1.pep
FSQDSTIYGYDRLLYAHGQLWLQRHPIMGKPVGFFPYVGWVPIFMIEKPIIKYIFIGVLGLLVIPSKN

SEQ ID NO: 279501 - protein, 60 aa, Glycine max
  Clone ID: PAT_MRT3847_94411C.1.pep
AMYKCNVINIVMVPSRKHEPAFICMYHCMKVPLVPVWLDQSMQSIYILNDQTEKIVLTTQ

SEQ ID NO: 279502 - protein, 70 aa, Glycine max
  unsure (1)..(70): unsure at all Xaa locations
  Clone ID: PAT_MRT3847_94412C.1.pep
SITTGNRSGTSMVAPFTGTKSMADFCIRNTNDDITIIASNGAXVQCMHMWTPVSMKQIDTDSYLPDIDHA

SEQ ID NO: 279503 - protein, 45 aa, Glycine max
  Clone ID: PAT_MRT3847_94413C.1.pep
QMGRRQIATTTLLTIVKDTRLQHYQKTHYKRVKRNVSMCGRSQRI

SEQ ID NO: 279504 - protein, 154 aa, Glycine max
  unsure (1)..(154): unsure at all Xaa locations
  Clone ID: PAT_MRT3847_94414C.1.pep
MAMVSSKRLLLRRQLNRHLSTSRVVIDDDDDDHDRRLNSSSAEKMSNLYGEYTXEIHYLLNVVXIGDSGMWKTQFLERLAKNHFNVDSKATIGVXIKTKTLIIDKKTVTAQICDTVHQERXVLPTSAYYRGAVGAMLMHDATRRPSFRNTAKWF

SEQ ID NO: 279505 - protein, 54 aa, Glycine max
  Clone ID: PAT_MRT3847_94415C.1.pep
PRRRHKNTKQLRKEQKKKKRKNKTKKKKKKKKNKKKKNKHKTKKKTRKQKQKGA

SEQ ID NO: 279506 - protein, 396 aa, Glycine max
  Clone ID: PAT_MRT3847_94416C.1.pep
MSWLFKSNHPDPESSNLHNRTVIHSSSPPHPAADRHGVKDDISHIFRGVANFLAPPPPSSSSSSSSSSSSSAGDSSSSQALSGIRNDLVEIGGSFKNSLSRISSNKAVTGISKLASQLLQLEPDQQRSNDDDAVPGTTEDVVRFVKEISARPQCWTEFPLPLHNDFSMSNSQREHALAIEQLVPEFIALRLNLCSYMNVEKFWMIYFLLILPRLNQHDFERLSTPKIVEARDVLLQKLGERKNLQAGEPEKPRTVDTYQEGREDSERESISSEQNQILTEVTNAVEGLEVDDTISSEKWLGDTDIDASSLASCTKLQQEEDVSFSDLDDDRSYSSDKLSGYREAHDIRGSSPEGATSDWVRLRKSSESDGRKKVIRVKGKDSEDESNDWLTVDDFN

SEQ ID NO: 279507 - protein, 62 aa, Glycine max
  Clone ID: PAT_MRT3847_94417C.1.pep
LTCKKTGGALSIQPKTNGQRLTGKKTQLRVNHTQKTIPVKFNNTHFYYERGHWAPLLENRWE

SEQ ID NO: 279508 - protein, 51 aa, Glycine max
  unsure (1)..(51): unsure at all Xaa locations
  Clone ID: PAT_MRT3847_94418C.1.pep
LPCFSGYAFLFLPILFHIXLSHLKSRAVNKKKQFTYLITIISSFYSSNFYL

SEQ ID NO: 279509 - protein, 80 aa, Glycine max
  unsure (1)..(80): unsure at all Xaa locations
  Clone ID: PAT_MRT3847_94419C.1.pep
MVPVAASFALGITSEGTXVGWYDGGXIAFAVSLVIDVTAIXVHYKLSLQLRHLNADKMNIHLDVVSGGEWVEISLHVIHG

SEQ ID NO: 279510 - protein, 91 aa, Glycine max
  Clone ID: PAT_MRT3847_9441C.1.pep
TWVEIGKARKNINIASRVVRHRSQHNCILNSSFAFKLLFNFLVIFFLLPFYPQISHLQFFSSSTSSIVYKLSIYQRKYKQSFCELDTRSSV

SEQ ID NO: 279511 - protein, 49 aa, Glycine max
  Clone ID: PAT_MRT3847_94420C.1.pep
DPLVRQFHFITTLFQSLSNRNTIPGAFNAKGPALYSDQMHSQTLKHKNR

SEQ ID NO: 279512 - protein, 71 aa, Glycine max
  unsure (1)..(71): unsure at all Xaa locations
  Clone ID: PAT_MRT3847_94421C.1.pep
LDYVMLAMQWPGTDCKRTRSCXPTNGCCRGSNSLAIFTIHGLWPDYNDVSWTVCSSGSSVDPTEISTLTNA

SEQ ID NO: 279513 - protein, 361 aa, Glycine max
  Clone ID: PAT_MRT3847_94422C.1.pep
LQYPFYTEGSKALLDARIYIAKYSLTRAALRIQRAQRRRDDPDEDMDAEMNWALKQAGNLSLEFSEIGDDRPLSGCSFSRDGKWLATCSLTGASKLWSMPKIKKHSSFKGHTERATDVAYSPVHDHLATASADRTAKYWNQGSLLKTFEGHLDRLARIAFHPSGKYLGTASFDKTWRLWDIETGDELLLQEGHSRSVYGLAFHNDGSLAASCGLDSLARVWDLRTGRSILALEGHVKPVLGISFSPNGYHLATGGEDNTCRIWDLRKKKSFYTIPAHSNLISQVKFEPQEGYFLVTASYDMTAKVWSGRDFKPVKTLSGHEAKVTSVDVLGDGGYIVTVSHDRTIKLWSSNTTDEQAMDVD

SEQ ID NO: 279514 - protein, 97 aa, Glycine max
  unsure (1)..(97): unsure at all Xaa locations
  Clone ID: PAT_MRT3847_94423C.1.pep
MGELKISRSNILLPKNTVGGTILRWDSWANXLTEGSFRASVDLQRTHLFEGMTNMVATVGIPENTGRASPCAMNSDFRGRANSDSHTISSQDCEKWN

SEQ ID NO: 279515 - protein, 76 aa, Glycine max
  Clone ID: PAT_MRT3847_94424C.1.pep
LAETTTLPVAAFDTIVSAYVKIHDLEGPASGSTMFSLDPLTALLRTNRPRLLHDKWSRCFTYYSTCTYECISCSTP

SEQ ID NO: 279516 - protein, 121 aa, Glycine max
  unsure (1)..(121): unsure at all Xaa locations
  Clone ID: PAT_MRT3847_94425C.1.pep
ISFSPNGYHLATGWEXDTTCXIWDLRKKKSFYTIPAPSNLISQVKFEPHEGYFLVTASYDMTAKVWSGRDFKPVKTLSGHEAKVTSVDVLGDGGSIVTVSHDRTIKLWSSNPTDEQAMDVD

SEQ ID NO: 279517 - protein, 484 aa, Glycine max
  Clone ID: PAT_MRT3847_94426C.1.pep
MFKKIMKGGHKKPSKSDASDPAPQPYAAANFSAPAAPSANVVVNFVSLTPLTLSSGGSVEPVPPFRDAPVAERQNLFLRKLHVCCYILDFSDTLKNGSRKEIKRQALMDLVDFIQSGSGKISENCQEEMIRMISVNIFRCLPPASHENTGQEPTDPEEEEPSLDPSWPHLQLVYELLLRYVVSSDTDTKIAKRYIDHSFVLKLLDLFDSEDPREREYLKTILHRIYGKFMVHRPFIRKAINNIFYFRFIYETERHSGIGELLEILGSIINGCALPMKEEHKLFLARALLPMHKPQPVGVFHQQLSYCIAQFVEKDYKLADTVIRGLLKYWPVTNCQKEVLFLGELEEVLEATQTAEFQRCMVPLFRQVARCLNSSHFQVAERALFLWNNEHIVSLIAQNRTVVLPIIFEALEKNIKSHWNQAVHGLTVNVRKMFIEMDAELFEECQRQYEEREAKAKELEEQRELNWKRLADAAAQNGVDMVTA

SEQ ID NO: 279518 - protein, 67 aa, Glycine max
  unsure (1)..(67): unsure at all Xaa locations
  Clone ID: PAT_MRT3847_94427C.1.pep
HWNQAVHGLTVNVRKMFVEMDAELXEECQRQFEEREAKAKELEVQRELNWKRLAEAASQNGVDMVTA

SEQ ID NO: 279519 - protein, 170 aa, Glycine max
  Clone ID: PAT_MRT3847_94428C.1.pep
LGDGNKNITVQNVNCGPGHGISVGSLGRYDNEEAVEGLLVKNCTLNNTDNGLRIKTWPSTPLTITVTDMHFEDITMENVSNPVIIDQEYCPWNQCSKKNPSKIKISKVSFKNIKGTSGTKEGVIFICSSVAPCEGVEMTDVDLTFNGAATTAKCANVKPVITGKAPTCAA

SEQ ID NO: 279520 - protein, 85 aa, Glycine max
  unsure (1)..(85): unsure at all Xaa locations
  Clone ID: PAT_MRT3847_94429C.1.pep
MHIFINTLTGNTISLDVESYDTIYNVXAKIHDKEGILPDQQRLIFSXKQLDDXHTLADYNIQNESTLHLVLRLRRGMQISPKTLT

SEQ ID NO: 279521 - protein, 108 aa, Glycine max
  unsure (1)..(108): unsure at all Xaa locations
  Clone ID: PAT_MRT3847_9442C.1.pep
APGVADTHKGDSSTYLADLRQLGEQAIRGGLDPRNKVPGAPEASMTRLXPSGALGDHSNLNAMTVLNANKGXLWRHFVDPVHDSITLLMYLLPEFKFEEVLVAGIHAF

SEQ ID NO: 279522 - protein, 244 aa, Glycine max
  unsure (1)..(244): unsure at all Xaa locations
  Clone ID: PAT_MRT3847_94430C.1.pep
MVQRLYFRETNKVYTSCGYNNDIYGGAKVATSLFSVHVMMKLAVCDSGSISVLLLQKIHEILTKLSIHPAFSELVSQYSQRGYSEGKELKKLILSDLYYHLQGELEGRKIDIGPFKELSQYLVESNFLGTYQHLFNEDSFTKNMFTKNVYLFDLAHLREDLRLDLWGXSNWKTSKEIAETMLRFLQDANSVMLLSSSKLSALKGLIAGLAVNHYDSQGRATTGGRISDELIFAFMDNICQSFLA

SEQ ID NO: 279523 - protein, 83 aa, Glycine max
  unsure (1)..(83): unsure at all Xaa locations
  Clone ID: PAT_MRT3847_94431C.1.pep
LCLRSPDCHDXTKXNKTHQXTVVAXDVCRASCGGRMSRALVVGXSRASSAGLLPLRSRTSSAIVVCVADARAVVRRAGDCCWS

SEQ ID NO: 279524 - protein, 65 aa, Glycine max
  Clone ID: PAT_MRT3847_94432C.1.pep
PQEIITRSHGGPSNPWSPTKGMLCGTRPDFSFFGGVSLTPNKTIFNFGFPEKRAHQTFFFLRGST

SEQ ID NO: 279525 - protein, 70 aa, Glycine max
  Clone ID: PAT_MRT3847_94433C.1.pep
NGIWPITHFDRDRSSKIVGPNAKAISDKKTNYQEIISKKPTHVSQKLQKKLKLQERFTRTQLIKSIPYAW

SEQ ID NO: 279526 - protein, 105 aa, Glycine max
  Clone ID: PAT_MRT3847_94434C.1.pep
PSQPQSSRSGGWVLTKFSTVSIQSPNIHLVVVVIVGRLERKLLVVSAGVLFAVSPQGKLSPCQRSAVQRRPFRTIDCRYCQVWQLVTVSAFPVLRNAWVRTREFP

SEQ ID NO: 279527 - protein, 57 aa, Glycine max
  Clone ID: PAT_MRT3847_94435C.1.pep
SLIIKCLFHINSTNSFIFYTKTTYKHPSFLMYYFLLCHLLKQCCYSSFWIRTNGNSH

SEQ ID NO: 279528 - protein, 91 aa, Glycine max
  Clone ID: PAT_MRT3847_94436C.1.pep
SHLKSAIRGFISLDGDLRLTHLKIQLNLDLIETVLTQILCRSDAHDRHSHSAHRIRASEMSLLPQGALLQITESCNDYLQEEFYVFREIVN

SEQ ID NO: 279529 - protein, 71 aa, Glycine max
  Clone ID: PAT_MRT3847_94437C.1.pep
TEKKILFICDGKDRHSSSTRDCFPLVLVCQNSSSLRICLSSDSRQQRISCKHIILCPSFAHNDHHTNDYSK

SEQ ID NO: 279530 - protein, 56 aa, Glycine max
  Clone ID: PAT_MRT3847_94438C.1.pep
IFPNRNKTPRNFISIRCTITPFFSDKKKQIVNYRSNRGLKKTLVPSGLKFQTGFWP

SEQ ID NO: 279531 - protein, 98 aa, Glycine max
  Clone ID: PAT_MRT3847_94439C.1.pep
VNFFVLYYKPINKAVAIAKTFFAESAFLQFGFETLLGVPICHFMYKGHATLSSSLEYKDYSIKKSKDFLVSNIPVVLYNDYATICFVTVSTFNLYCAS

SEQ ID NO: 279532 - protein, 66 aa, Glycine max
  Clone ID: PAT_MRT3847_9443C.1.pep
FQESFNFFLLFCERLLKGKKFTLCAGHRLRESFSFAFLVYLLNTLLFDIGLRVRFKLLLFLLQFSV

SEQ ID NO: 279533 - protein, 61 aa, Glycine max
  Clone ID: PAT_MRT3847_94440C.1.pep
VKFPYLCFFTPCALCTCVPRAPPPLLKENGVNISGEGCNTEEVGLFLEAPLFWGIQGEKFL

SEQ ID NO: 279534 - protein, 135 aa, Glycine max
  unsure (1)..(135): unsure at all Xaa locations
  Clone ID: PAT_MRT3847_94441C.1.pep
REEVAVFLKKIAYXKDTTIYVTQSKRLESLEGVIYXSPKTYTNXSIIPTYKKKKFLDSKHSYLDKMIDFYITSXNDLFVPPISGLFYSNISCKKIGSTKYHILDPTNIPDSSASASILFSHYVSNKNHFTYPSYC

SEQ ID NO: 279535 - protein, 62 aa, Glycine max
  Clone ID: PAT_MRT3847_94442C.1.pep
DMDDPLSVELDNFQASSVPKSHPACVFPLSSGYIVPVLMAPHPVESLMLATLHLFPKACTHV

SEQ ID NO: 279536 - protein, 88 aa, Glycine max
  Clone ID: PAT_MRT3847_94443C.1.pep
KLPHHPTTQSDIDQIENHINANVHQSDPTTIQTFNHAPPSPTPSPSPLPLPPTSLPTSLLSHPSPNPPTPPNHRPHHRLAPASPPPGS

SEQ ID NO: 279537 - protein, 44 aa, Glycine max
  Clone ID: PAT_MRT3847_94444C.1.pep
TVLPAAREPGLQVLGRDGLWRDVPGDAGWLVINTGDMLQEASGG

SEQ ID NO: 279538 - protein, 92 aa, Glycine max
  Clone ID: PAT_MRT3847_94445C.1.pep
NPRDDPRRRFFRGRTRGPTRGTTEKTGGRPKNEHKNSKRGNEQQEGQQRDKREETGKGKSRGGPRRRRGRTTDKASGGDSREQGPGEHRERG

SEQ ID NO: 279539 - protein, 169 aa, Glycine max
  unsure (1)..(169): unsure at all Xaa locations
  Clone ID: PAT_MRT3847_94446C.1.pep
GSPGGFLPKAQGGGFFVLTWGSPKKQIFXMPPGGAAFLRGGPTLFQLARKDQGLAFGVRPRSQSKIQSPFSRVFPNGGVPFLPPKEGVFPXKVPPGPPGGGQNFRFFGKNVCPFGVKFPGHPPFFFWAPPSFFFFLFPRGSLFWYIFSWDIRAPLSIFFCPQYCFNSGP

SEQ ID NO: 279540 - protein, 187 aa, Glycine max
  Clone ID: PAT_MRT3847_94447C.1.pep
GRNSRLDPRVRGRVGVEALLPEYKNNVSASSLPQSAAIPPGYGFGSSTSIPGGNFSLNPPAAPTGTTIGYEDLINSQFKDNNHMMSLQQNENSPMWVQGPGSRTMSAVPPSNYYNLQGQNQQQPGGFRQRQQQQQQPSQHFGGYPNFYHSQTGISLEHQQQNPREASLAGSQTQPPKQSPQIWQNSY

SEQ ID NO: 279541 - protein, 38 aa, Glycine max
  Clone ID: PAT_MRT3847_94448C.1.pep
SQLIYLLRQYLLGKSMIHPIKTDDPSKDYIKSTSQHRK

SEQ ID NO: 279542 - protein, 66 aa, Glycine max
  Clone ID: PAT_MRT3847_94449C.1.pep
GSSCMDESINRICVDRADSAQRLTYGILVMTHRLSLTIYTHFPRMLCALSVITCTRPTQPIQRVRY

SEQ ID NO: 279543 - protein, 83 aa, Glycine max
  Clone ID: PAT_MRT3847_9444C.1.pep
LRCVDGPITSLSIPALPGTAAVRNVSDAMHKRVNDCCFFLAPGLQKNDLENYSETKTDGVTRRTALRKETLCKRKERRKEESR

SEQ ID NO: 279544 - protein, 151 aa, Glycine max
  Clone ID: PAT_MRT3847_94450C.1.pep
HAAEMPLIGTCSQYRHQGMCRLLVSAIEQMLISFKVEKLVVSAIPDLVETWTKGFGFITVDDIERQRLNKINLMVVTGTELLVKSLHGKEKIERLCDLSILATDESIKACICSEGMAISESFAQVGGNITTNKGGAKAEHEPVDGKNQSDY

SEQ ID NO: 279545 - protein, 49 aa, Glycine max
  unsure (1)..(49): unsure at all Xaa locations
  Clone ID: PAT_MRT3847_94451C.1.pep
LVLLERMLLFVRKENGRLSCLRCAXKVGYVLSVNFXKVKKVWGRVGAPF

SEQ ID NO: 279546 - protein, 68 aa, Glycine max
  Clone ID: PAT_MRT3847_94452C.1.pep
ELPSFLKEHDGRCGCMRSWCVVTANMKRSSEGVKKMDLVLANAECMYIHIFIQIGSAKRMSRVKERDK

SEQ ID NO: 279547 - protein, 793 aa, Glycine max
  Clone ID: PAT_MRT3847_94453C.1.pep
MAPPLGIQPMQQPGSVPPIRAIQGLAEDFNALTLQTRPGTMDPLFDAKELPRPLEGDIEPKNLVDMYPMNCNPRYLRLTTSAVPSSQSLASRWHLPLGAVVCPLAEPPDGEEVPIVNFAPASVVRCRRCRTYVNPYMTFTEAGRKFRCNVCTLLNDVPSEYYAQLDATGKRVDINQRPELTKGTVEFVAPAEYMVRPPMPPVYFFLIDVSISAVRSGMIEVVANTIKSCLDELPGFPRTQIGFATFDSTIHFYNMKSSLTQPQMLVVSDLDDIFIPLPDDLLVNLSESRNVVETFLDSLPTMFQDNVNLESAFGPALKAAFMVMSQLGGKLLIFQNTLPSLGVGRLKLRGDDSRVYGTDKEYGLRLPDDPFYKQMAAEFSKYQISTNVYAFSDKYTDIASLGTLAKYTAGQVYYYPAFQSAIHGEKLRHELRRDLTRETAWEAVMRIRCAKGVRFTTYHGNFMLRSTDLLALPAVDCDKAFAMQLSLEETLLTTQTMYLQVALLYTASCGERRIRVHTMAVPVVTELADIYRLADTGAIVSLLSRLAIEKTLSQKLEDARSAVQLRVVKALREYRNLYSVQHRLANRMIYPESLKFLMLYGLALCRSTALRGGYGDVPLDERCAAGHIMMTVSIKRLLKLLYPSLIRLDEYLLKASVQADDLKSVERRLPLTGESLDSRGLYIYDDGFRFIIWFGRVISPDIAKNLLGADFAAELSKTTLSEHDNEMSRRLVKVLEKLRYTDRAYYQLCHLVRQGEQPKEGFLLLSNLVEDQMGGNSGYAEWMLQISRQVQQS

SEQ ID NO: 279548 - protein, 55 aa, Glycine max
  unsure (1)..(55): unsure at all Xaa locations
  Clone ID: PAT_MRT3847_94454C.1.pep
GITPKSIGTNYGLPIRDLAKLXQLIIXLYAPXQCIDSQLEXLAIFXLTNCKVLNT

SEQ ID NO: 279549 - protein, 78 aa, Glycine max
  Clone ID: PAT_MRT3847_94455C.1.pep
KFKNKNKYKLFSLKNLILKKFTLTKINLCTIIQDTLIIKKYIKTLQTEFLSPNSSYNWVLLLKKIIAKLTLKKKKFFS

SEQ ID NO: 279550 - protein, 508 aa, Glycine max
  Clone ID: PAT_MRT3847_94456C.1.pep
MSCFSSQTSSENYYSRIPVVDEGSTSAKKSGGYMPSLLLAPRMDSAESSVQTQEFIVGSKPQPCPEPSNGVDYSLGTVSGPQDTGITPENRTCNPKRCRFFGCTKGARGASGLCIGHGGGQRCQKPGCNKGAESRTAYCKAHGGGKRCQHLGCTKSAEGKTDYCIAHGGGRRCGYPGGCNKAARGKSGLCIRHGGGKRCRIEGCTRSAEGQAGLCISHGGGRRCQYQECSKGAQGSTMYCKAHGGGKRCSFAGCTKGAEGSTPLCKAHGGGKRCLFNGGGICPKSVHGGTNFCVAHGGGKRCAVAGCTKSARGRTDCCVRHGGGKRCKYEGCGKSAQGSTDFCKAHGGGKRCSWGDGKCEKFARGKSGLCAAHSSLVQEREMNKGSLIAPGLFRGLVPSASTACSSFENNSSSGVSVLSDSYDSMETPAKRQHLIPKEVLVPLSMKSPSYSSFLAAKKSDQDRNCQSLAAGGSGAQKGIDFNLPEGRVHGGDLMLYFGGNLKNALDGI

SEQ ID NO: 279551 - protein, 237 aa, Glycine max
  unsure (1)..(237): unsure at all Xaa locations
  Clone ID: PAT_MRT3847_94457C.1.pep
MKFSNGGDDGCKLVLGLGPTPMAYVDDYNNLGFNMKKNSANLFTQHVPSECESILQLGLSGVTNEASSVLDCSGSTETDVNMSCFSSQTSSENYYSRIPVVDEGSTSAKKSGGYIPSLLLAPRMDNTESSVQTQELIVGSKPQLCPEPSNAVNYSLGTVSGPQDTGITPENRTCNPKRCRFFGCTKGARGASGLCIGHGGGQRCQKPGCXXGAESRTAYCKAHGGXKRCQHLXCTKS

SEQ ID NO: 279552 - protein, 107 aa, Glycine max
  unsure (1)..(107): unsure at all Xaa locations
  Clone ID: PAT_MRT3847_94458C.1.pep
XFRCYXRLXHIXXXSXHXLXXXXXXSNGHXXLXXNQNXXXXXXXXLXXYXXLXXVXXXXXXCXXGXXYFCPXPXXXSXSXXXXXXXEXXXXXXXXXXXLXXFXXCXX

SEQ ID NO: 279553 - protein, 129 aa, Glycine max
  Clone ID: PAT_MRT3847_94459C.1.pep
MAKMKVSESLDPMGAPTDDSSSALQIQNLKNLNALLLKETTQRRHQIHSLQSALHRSAVTFDTNLAFHLQNAVVSVFFKNQLQEMNLRFDTLLGDRDFEVSALKHQLSDLVARLENETTALAEDRDGLV

SEQ ID NO: 279554 - protein, 133 aa, Glycine max
  unsure (1)..(133): unsure at all Xaa locations
  Clone ID: PAT_MRT3847_9445C.1.pep
CVHPLNFDPSKQSFCQWSVDLLGGGILVDKTGDWITLIQNSAISNLLRVAAWKNGXSLVKIGIPGNAAVKGSDXHSLVQVFLTNSNSTEHFDACKWTKSEPHSWELIFPIEESGPNNGFEMWSSEWANQTSWH

SEQ ID NO: 279555 - protein, 58 aa, Glycine max
  Clone ID: PAT_MRT3847_94460C.1.pep
GGKKISFQTFFYWGQQMKKHSGFNLGKNFFPGLILGFPFYVQGTLFTFPGGPLPQMKD

SEQ ID NO: 279556 - protein, 84 aa, Glycine max
  Clone ID: PAT_MRT3847_94461C.1.pep
PCARNPLQGYCRPAFCKIASAKQALPYLFKQNPTSIIPTLFLNPLFESPLFKLGCLSCKFPLCVSPFFLKGSLPIISFQKVCFR

SEQ ID NO: 279557 - protein, 49 aa, Glycine max
  Clone ID: PAT_MRT3847_94462C.1.pep
SSDRVSRSDPTFYHERNLASNQSTCLILHSRFKSSNLDHDMISVHSSCV

SEQ ID NO: 279558 - protein, 55 aa, Glycine max
  Clone ID: PAT_MRT3847_94463C.1.pep
IQKINTLHTCYHMQLGIYIMASYSDKWEYPNMNHQYPYPIYLRTLQTVANHNPCA

SEQ ID NO: 279559 - protein, 53 aa, Glycine max
  Clone ID: PAT_MRT3847_94464C.1.pep
YTKRMVCHHKTGGRIPYHNNLTILFYNSLIFQFYHYMCLPFTLNLCFHTIFYI

SEQ ID NO: 279560 - protein, 43 aa, Glycine max
  Clone ID: PAT_MRT3847_94465C.1.pep
ALIIFLDNALIAPESSPCSLRLSLLAQGCFIIKRQCWPCTCQR

SEQ ID NO: 279561 - protein, 170 aa, Glycine max
  unsure (1)..(170): unsure at all Xaa locations
  Clone ID: PAT_MRT3847_94466C.1.pep
MSMHSFRFLQLIFPCRRCFSTQNSVFRSLLDYSGNDPVALIATQLSNCATVRELNQVYAHVLTTHFLISNPAPFNWNNIVRSYTRLEAPRNALRILVFMLRNGVLPDCYTLPIALKAVCQTFDVNLGKQLHSIAIKIGLQCNEYCETGFLSLDLKAGEFXGARMVFDENP

SEQ ID NO: 279562 - protein, 80 aa, Glycine max
  Clone ID: PAT_MRT3847_94467C.1.pep
FFRLEKLFATLLGHFLVVDPLKNTFFALKGPLSLPFSPTTPVCFYDFGPFYPVIKGATHGFYGLRWVVFCTFSSRSLVPR

SEQ ID NO: 279563 - protein, 138 aa, Glycine max
  Clone ID: PAT_MRT3847_94468C.1.pep
VLLFLLCCIYTQFFFFCDLRSSPTKATFSGDQTTLAKATYYLFQVSFSFLLSELRFLPIMFFPFLPFPNTLFLYFTFVLCFLSFLLAGSNHIFFPVFVLFYILEEDMTFCRGRRFPLRGYCTWIVMTSSLVSFSFKDV

SEQ ID NO: 279564 - protein, 43 aa, Glycine max
  unsure (1)..(43): unsure at all Xaa locations
  Clone ID: PAT_MRT3847_94469C.1.pep
RXRHAQKKRISGAGQDVQQRGEQRGFIPRVVKELAFLDASNHG

SEQ ID NO: 279565 - protein, 52 aa, Glycine max
  Clone ID: PAT_MRT3847_9446C.1.pep
SGPIHYIKPCTSHYLVSIVYIVLNKQRTLHPHCINKNPCHCKIPVEIKLKFS

SEQ ID NO: 279566 - protein, 62 aa, Glycine max
  Clone ID: PAT_MRT3847_94470C.1.pep
DGHPPILCLIKLFFFLPIHTLGGTHKTAGDYSTFYKTNNNTPFSLWDIVLPTFIVPSQNLRV

SEQ ID NO: 279567 - protein, 73 aa, Glycine max
  Clone ID: PAT_MRT3847_94471C.1.pep
IFDSADRPLEGKRWWLQAEDPFQCLAACTNLSEALRSPTPETTISHMPVHQDGSCNGLQHYAALGRDKNGLFK

SEQ ID NO: 279568 - protein, 45 aa, Glycine max
  Clone ID: PAT_MRT3847_94472C.1.pep
RALQWHNLINRESTSASLPLCSLKIYFTFTLWGLFPKRSGFITHL

SEQ ID NO: 279569 - protein, 82 aa, Glycine max
  unsure (1)..(82): unsure at all Xaa locations
  Clone ID: PAT_MRT3847_94473C.1.pep
MAHHYHKFPLQMKTGYGGQFIIDVACPSWMLGLEANNVFQRYTVPATCMXYIPDYVLRDPYISDSKTVHSHSYFYAKYLTLT

SEQ ID NO: 279570 - protein, 39 aa, Glycine max
  Clone ID: PAT_MRT3847_94474C.1.pep
KPKKNFFFLPMAEKRDKVPPKFWVGHMPIYKYKWVLGSL

SEQ ID NO: 279571 - protein, 225 aa, Glycine max
  Clone ID: PAT_MRT3847_94475C.1.pep
HAFAHASAHASGEVLDMVEEGLWVQDKFSLSKLIRDVHSDSLLRINQYPPVSLKGTKNWDTSKLEAHQLQSQNNNNNNNNIGFGEHSDPQILTIMRSNNVDGLQISTHDGLWIPVPPDPNEFFVMVGDALQVLTNGRFASVRHRVVLTVNDVLSMSMMYFAAPPLNWWITPLPKMVTPHNPSLYKPFTWAQYKQAAYSLRLGDARLDLFKIQRQQDTHLIAPAST

SEQ ID NO: 279572 - protein, 61 aa, Glycine max
  Clone ID: PAT_MRT3847_94476C.1.pep
QKLGFCTKASHSFGVTVPETRETVAAGINSPPPPPSSSSPQNPNFFYSPNHILGVGRCVQP

SEQ ID NO: 279573 - protein, 334 aa, Glycine max
  Clone ID: PAT_MRT3847_94477C.1.pep
MAPNNNRTKGSHFPLLAFLFLCLLAPLLFFFFASPLHDRSDNSAVSIEKVAKLKEWQALQDLKSLFSKEVLDVIVSNTNDVGPLSLESFRKNNLSASWRVAGLRTSNAMNQLNQPADNFRQEKQNGKEGRFSVGRAQWTDSPVQLSRRQLVEKRKEKRAAELVKQDDEVIVKLEDSAIEHSKSVDSAVLGKYNIWRKENENENADSTVRLIRDQIIMAKVYLSIAKMKNKLQLYQELESQLKESQRALGEATSDADMHHSDHEKMKTMGQVLSKAKEQLYDCELVTGKLRAMLQTADEQVRGLKKQSTFLSQLAAKTIPDGIHCLSMRLTIDYY

SEQ ID NO: 279574 - protein, 61 aa, Glycine max
  Clone ID: PAT_MRT3847_94478C.1.pep
IQISEFMKLQLRLSRETLIPKFSFCHNLLISYPNHIPQSPKFIFFHSPSFQPIEISNKSLK

SEQ ID NO: 279575 - protein, 170 aa, Glycine max
  unsure (1)..(170): unsure at all Xaa locations
  Clone ID: PAT_MRT3847_94479C.1.pep
SSRLVKKGALELQFEKGVLTXPRFEVCHWTXXXIRNXVAIEQGHYPFQTYITDYIFVFDFLIDTSQDVDTLVDKGIMINTLGDSSAVANMVNNLCLNVVQENININGGYIYLCRKLNCFYEDPSHKYKAIFMHDYFSTPWKITSFIAAIVLLFLTLIQATCSVISLFYQK

SEQ ID NO: 279576 - protein, 138 aa, Glycine max
  Clone ID: PAT_MRT3847_9447C.1.pep
FHEVAQIMNLRQSVVGDLKLLTDGKLHEGKHIPVSNISAGENHVVQIPLMAQEETLSSIASDYRTGMVRKNSKPKATAMHVGAIEIMIDRSPSPDCNIAGARLLVDTYHTNPEKAVRSIFVAPFIGGRHIQVVTFSNT

SEQ ID NO: 279577 - protein, 113 aa, Glycine max
  Clone ID: PAT_MRT3847_94480C.1.pep
YTFVHFSPKYYLHNIFFYITNVSPPLCVPLYIYTFLHTHPIILFLSHNLTFSFALPPFSSFLKFSYIFIISLIFSTFIILTLSYTFFLLFPFFLFIHFPYFPTYLLIFFLYFP

SEQ ID NO: 279578 - protein, 53 aa, Glycine max
  Clone ID: PAT_MRT3847_94481C.1.pep
AGKLTLSKGFNIHHIYKGLIVQDGGSIGHKALKTGKFTHEGGVYSTYIIEHFG

SEQ ID NO: 279579 - protein, 54 aa, Glycine max
  Clone ID: PAT_MRT3847_94482C.1.pep
AVRPHVRTARRRQIGFLSVTETEASQEKANEGDPTHITYRGVPKRPWIFFCCGY

SEQ ID NO: 279580 - protein, 56 aa, Glycine max
  Clone ID: PAT_MRT3847_94483C.1.pep
PFIPSFLSSSSLPLSLADLGFSGNNLLSVLFTSESSSSLLLITLLTMLTQRLVRKT

SEQ ID NO: 279581 - protein, 67 aa, Glycine max
  Clone ID: PAT_MRT3847_94484C.1.pep
VCVLQQWLSSCCYDLTLCHSLQTVVMAANEQGGHLYDNKSKYGSGSVKSYQCPSQCSRRCSQTQYHK

SEQ ID NO: 279582 - protein, 39 aa, Glycine max
  unsure (1)..(39): unsure at all Xaa locations
  Clone ID: PAT_MRT3847_94485C.1.pep
CXCRXKXWXCYTHPRGKHXSLPRYSNFVRCFXXXXLFSL

SEQ ID NO: 279583 - protein, 81 aa, Glycine max
  unsure (1)..(81): unsure at all Xaa locations
  Clone ID: PAT_MRT3847_94486C.1.pep
MPNPKVFFDMTIGGXSAGRIXMELXADVTPXXXPRNXRALCXXEKXVGRXSKXLXYKGSSFHRVIPXXMCPGWRXTAGKGT

SEQ ID NO: 279584 - protein, 61 aa, Glycine max
  Clone ID: PAT_MRT3847_94487C.1.pep
VFRVWRRVEEFREKPTTLTAVSVSDFMDPHLSSQTELLASSFILMVTLLYLGSVQVCGLDE

SEQ ID NO: 279585 - protein, 110 aa, Glycine max
  Clone ID: PAT_MRT3847_94488C.1.pep
RDSSTVSMAAAFTSISVRLILSTVGETRGLQLRMCNPNPKKLKVMEGFGRCSGVAVGVRKRNRIGTVTVRDRASSSSDDAMNAQSKMTQKVIIDVSIGNPFVKLVSRIVI

SEQ ID NO: 279586 - protein, 35 aa, Glycine max
  Clone ID: PAT_MRT3847_94489C.1.pep
KQLTMWDKLDWPGANWIVAFKSAGQCNGFVDAYMG

SEQ ID NO: 279587 - protein, 98 aa, Glycine max
  unsure (1)..(98): unsure at all Xaa locations
  Clone ID: PAT_MRT3847_9448C.1.pep
QNPSTPNSVSYKTAAKEKLIKQGYNIVRIIXNQWSHLLRSHRDESTTFKLPNPXATFNNSFTSQQSXLXPIYLYIIKIVQIKPLSSLYVCSTVSQQVV

SEQ ID NO: 279588 - protein, 43 aa, Glycine max
  Clone ID: PAT_MRT3847_94490C.1.pep
PKTHTKYLHCKAEKPLIRSFKSPLSFIKPQVCFKAYFRPYITQ

SEQ ID NO: 279589 - protein, 32 aa, Glycine max
  Clone ID: PAT_MRT3847_94491C.1.pep
FRLALRREPSLPHSPIRSKFVRSIAVFSSFTI

SEQ ID NO: 279590 - protein, 53 aa, Glycine max
  Clone ID: PAT_MRT3847_94492C.1.pep
HRASPFNSLDVLLENAADTQTYTIELLSAASNNYKQTNSDSMEIFYQSPEDFI

SEQ ID NO: 279591 - protein, 87 aa, Glycine max
  Clone ID: PAT_MRT3847_94493C.1.pep
TAARRRQKGPFQFLCKYQYFYYISLKLINQYVHSISYLFLFFPFIIYVFLLYFLLHRQIYCNLVLFYFKTLTVLKFEYVLVLIFSII

SEQ ID NO: 279592 - protein, 48 aa, Glycine max
  Clone ID: PAT_MRT3847_94494C.1.pep
QRKKIKKNEKNVQTVKLQNLFWKYVQSSKIFKFKELRIFINFGRFFKK

SEQ ID NO: 279593 - protein, 50 aa, Glycine max
  Clone ID: PAT_MRT3847_94495C.1.pep
TMLMQMCAYLTFAERVIMGTSDLYQFVLDTNRIRVTCDDQYYIRPDLTRT

SEQ ID NO: 279594 - protein, 68 aa, Glycine max
  Clone ID: PAT_MRT3847_94496C.1.pep
ETHLFRKSLWPAPWLAFLPSYLDQLDKDGSNVVWEHIKGLFSLTFLRVKHIAFGAYLEVIELNLTIMF

SEQ ID NO: 279595 - protein, 75 aa, Glycine max
  unsure (1)..(75): unsure at all Xaa locations
  Clone ID: PAT_MRT3847_94497C.1.pep
MASDDFDIVIEAMLEXPIKKKKINHQRKXVKKDYPSNTTSSTSNSGNETSGSSTIGETSKKKRSRSHNKSKDRKP

SEQ ID NO: 279596 - protein, 56 aa, Glycine max
  Clone ID: PAT_MRT3847_94498C.1.pep
GSRTIKRPSVAAGSKRVLYGPLVKDKKSEGVRISIHEGSSDSCLIWDIIDWTSDLT

SEQ ID NO: 279597 - protein, 98 aa, Glycine max
  unsure (1)..(98): unsure at all Xaa locations
  Clone ID: PAT_MRT3847_94499C.1.pep
DISSKTGFSRTIRNVLRRATKETEQXQLLEVDAVIPNHYLXPISQELITHPVTLSTVITYYRLIMLMYINAEIRSXLSTTNXLTTFDLIHNHAIPMMI

SEQ ID NO: 279598 - protein, 64 aa, Glycine max
  Clone ID: PAT_MRT3847_9449C.1.pep
NTLILYTSQLPCHCPCVAAMASVINQASVAIFRACTAKSRLLSGTSGQLKPEVTLLPMRCPPSA

SEQ ID NO: 279599 - protein, 271 aa, Glycine max
  unsure (1)..(271): unsure at all Xaa locations
  Clone ID: PAT_MRT3847_944C.1.pep
EQLANSSFSPDPTIVGGKPLKMLSGSCYLPHPDKEETGGEDAHFICTDEQAIGVADGVGGWADVGINALLFAQELISNLVRAIQKEPKGSFNLTRVLREAHANTKVKGSSTACIVALTDKLVXGLHAINLGDSGFIVVRDGCTIFESPSQQHDFNFPYQLESGNGADLPSSGEVFTIPVASGDVVISGTDGLFDNLYNSEITGVVEHAIRAGLEPQVTAQKIAALARQRALSKSSRTPFSTAAEKAGFCYYGGKLDDITVVVSYISGSVSE

SEQ ID NO: 279600 - protein, 58 aa, Glycine max
  unsure (1)..(58): unsure at all Xaa locations
  Clone ID: PAT_MRT3847_94500C.1.pep
DVMPIATAHQRQELQAELEEWSILDIDHPQXSFCTKEAPAVDKSYYDKRIXRCAGGDA

SEQ ID NO: 279601 - protein, 110 aa, Glycine max
  Clone ID: PAT_MRT3847_94501C.1.pep
MSADNKSHRLYVKGKHISYQRGKRNTNPGTSLLKLEGVDDVKAAQWYAGKRVAYVYRAQRAIQGSKIRVIWGKVTRPHGNSGVVRAKFKNNLPPKSFGASVRVMLYPSSI

SEQ ID NO: 279602 - protein, 41 aa, Glycine max
  Clone ID: PAT_MRT3847_94502C.1.pep
LFFLFFFVFFFFFFFFFNKKTDRCDLGVSCILGGGLIYFEV

SEQ ID NO: 279603 - protein, 44 aa, Glycine max
  Clone ID: PAT_MRT3847_94503C.1.pep
GSKEKSPHVDSSSVLLLRTLPCFRKPGYPLFTSFICSQNFQKIK

SEQ ID NO: 279604 - protein, 503 aa, Glycine max
  unsure (1)..(503): unsure at all Xaa locations
  Clone ID: PAT_MRT3847_94504C.1.pep
HASAHAPSSGGSVELGAVAAIRMPLLHVSNFKGGTPELVETCYAILVLVLPSSSTRVWTYHEMEIVEVVADQVAVALSHASVLEESQLMRQKLEERNRALQQAKKNAMMASQARKSFQKVMSHGMRRPMHSVLGMLSLFQEDIVXTGQRIRGDTMLKVVNELSIFIDDVMEMSXNEKGGFRLEMKPYLLHSKVKEAASIAKCLCVYEGFGFEIDVQKSLPETVMGDEARTFQVILHMIGYLLNMNDKGTLNFRVFLESDGGDRDDKNIGIWRSSSQNEYVHIKFDFQITESSQSDKAISTIHYSSRRQYYNNEPKEGLSFSMCKKLVQMMQGNIWISPNSLGLVQGMTLLLKFQIGPSLGKSIFAPKDYSSSQFRGLKVLLAEDDGVNRTVTKKLLEKLGCQVIAVSSGFECLSAISGAGNSFRIILLDLHMPEMEGFEVAKRIRKFHSRSWPLIIALIASAEEHVREKCLLAGMNGLIQKPIVLHQIANELRTVLQRAGEKL

SEQ ID NO: 279605 - protein, 58 aa, Glycine max
  Clone ID: PAT_MRT3847_94505C.1.pep
HSGYTVTRDHLHAHFYFLYIQWHPTDTYVFSINCTALSNIPYYNSTCLLRGEHYTLLV

SEQ ID NO: 279606 - protein, 37 aa, Glycine max
  Clone ID: PAT_MRT3847_94506C.1.pep
TSHVILGVHMKIHDGYFEILGLDKLACGSCYSLQISI

SEQ ID NO: 279607 - protein, 52 aa, Glycine max
  Clone ID: PAT_MRT3847_94507C.1.pep
LSVSTQTDLILKLGRRDLNSCLPGKIHNVKHEEENLHEHIGGPSMMFHEGQG

SEQ ID NO: 279608 - protein, 72 aa, Glycine max
  Clone ID: PAT_MRT3847_94508C.1.pep
EVAVRTHQLNGITGIRLKYHGNTYYFVRNKNSMTYQLQRGYDKEKGAIENVSEKIHIKGYKRDGGRARDLYC

SEQ ID NO: 279609 - protein, 92 aa, Glycine max
  unsure (1)..(92): unsure at all Xaa locations
  Clone ID: PAT_MRT3847_94509C.1.pep
RPPXPKSKXNSAKPSXXSVTXXXPNXGPLVXLNAXQXXQKXXQSXDYXSSNGXLGTXNXICKRVRXAVXNNDLXLDXKYWLXNFASPLVEIS

SEQ ID NO: 279610 - protein, 202 aa, Glycine max
  Clone ID: PAT_MRT3847_9450C.1.pep
MLCVKMSSSSSSPAVLSKCTVFPHRNSTLGDLKLSISDLNMFLSHYIQKGCLFTTPSLPSHSHTLIPHLKNALSQTLSLFPPLAGRLKTDTDGFVYITCNDAGVDFIHATAADISVADLLSPSSSSDVPPISKQLFPFHHKISYTAHSSPIMAFQVTDLADAVFLGCAVCHSVTDGASFWNFFNTFAGISRGATISPFSLPD

SEQ ID NO: 279611 - protein, 94 aa, Glycine max
  Clone ID: PAT_MRT3847_94510C.1.pep
HPLHHVAQPHVHHVCCPGVPQVYVQRQNGACSPREPSAGGCRWCPQDHPAQLPVLRSEPLFRSFSLALISASPQGHAPRSSWSYGFKAYMEGSE

SEQ ID NO: 279612 - protein, 51 aa, Glycine max
  unsure (1)..(51): unsure at all Xaa locations
  Clone ID: PAT_MRT3847_94511C.1.pep
VFFLFFXXXXXXIXMNXXXYXRXXXCXXXLXXAXXSKPKFPSFTYKCMRXR

SEQ ID NO: 279613 - protein, 269 aa, Glycine max
  unsure (1)..(269): unsure at all Xaa locations
  Clone ID: PAT_MRT3847_94512C.1.pep
RKRTWVADAEECKRRGSIETARAIYAHALTVFLTKKSIWIKAAQLEKSHGTRESLDALLRKAVTYRPQAEVLWLMGAKEKWLAGDVPAASVRREKTTEGIPNSEEIWLAAFKLEFENHEPERARMLLAKARERGGTERVWMKSAIVERELGNIEEERRLLDEGLKQFPSFFKLWLMLGQLEEQLAENAKRLDQPEKWLDHMNAAKEVYESGLRNCPNCVPLWLSLANLEEEMNGLSKARAVLTMARKKNPQNPELWLXCCRAELSMDIR

SEQ ID NO: 279614 - protein, 68 aa, Glycine max
  unsure (1)..(68): unsure at all Xaa locations
  Clone ID: PAT_MRT3847_94513C.1.pep
GPPFLMRTLRNAXVVSRGTCSHGQPLGDWSHAEAQSPRDRVATLSSHRLAGKNPGSCQKHSLRPPLSS

SEQ ID NO: 279615 - protein, 198 aa, Glycine max
  Clone ID: PAT_MRT3847_94514C.1.pep
MGKNQAYKAMQRARLGGASAGPDEVEDGMVDGSFHSPEWHAARLASLNTSHTITWEEYKMKQKEEELRKGELEADADRMMREYRAQLDAERARKLSQGRNHSNSKSKHVKDKRDKISKKHSSRKRKHSRRSSASSSSSSSSDSSSSDEEERGSRRSKSRSKRSKKEKKSKSRSKDAGSASEDEGPVRLSRFFGNVKSE

SEQ ID NO: 279616 - protein, 68 aa, Glycine max
  unsure (1)..(68): unsure at all Xaa locations
  Clone ID: PAT_MRT3847_94515C.1.pep
QVCGFLPNYLILQXYXXCVRFLKKLASAPKNQPXLKISKTKIIFTQDLIMPCYKNIPLYNKIFYSQSP

SEQ ID NO: 279617 - protein, 42 aa, Glycine max
  Clone ID: PAT_MRT3847_94516C.1.pep
NPVFKGMFRIKFCKGKILLFYFAGLVSFDKEKIVLARGGRHL

SEQ ID NO: 279618 - protein, 54 aa, Glycine max
  unsure (1)..(54): unsure at all Xaa locations
  Clone ID: PAT_MRT3847_94517C.1.pep
FPGMYNTEXNPRGPITATGHDASTLYAPLIHDGRMEKLHCTPTQEDRISVCTGI

SEQ ID NO: 279619 - protein, 92 aa, Glycine max
  Clone ID: PAT_MRT3847_94518C.1.pep
SHKILLFSPKIYYNPNSCQQTRRFDKYQNHNLECQIQTKNQKHRNIKQVLSVWVSVCLYGHKSSTCEIHCTLINMATTFFLFSFFLFIMVEA

SEQ ID NO: 279620 - protein, 71 aa, Glycine max
  Clone ID: PAT_MRT3847_94519C.1.pep
IVVPASALAVEALTLVNDLFTTGSRIAFLFISCVNSELVFLSCEKMVIFHLVLVGEDGKQEVNSHICIQND

SEQ ID NO: 279621 - protein, 229 aa, Glycine max
  unsure (1)..(229): unsure at all Xaa locations
  Clone ID: PAT_MRT3847_9451C.1.pep
GWNRIPFTFLPPWAFWLVGSSGGLVCFSGHDGLTFKTLVCNPLTQTWRALPSMHYNQQRQLVLVVDRVDQWFKVIATSDIYGDKSLPTEVYDSKIDSWTVHQIMPAVNLCSSKMAYCDSRLYLETLSPLGLMMYRLDTGHWEHIPAKFPRSLLDGYLVAGTQKRLFLVGRIGLYSTLQSMRIWELDHTKITWVEIRRMKXIWSWIXGCALQSYNNQVCFYEPRFDASIY

SEQ ID NO: 279622 - protein, 167 aa, Glycine max
  unsure (1)..(167): unsure at all Xaa locations
  Clone ID: PAT_MRT3847_94520C.1.pep
MDKILEADANNMSQHSSSSVVALAIKGNKKSKYVVQWALNKFVPEGMIIFKLIHVHGGIKGVPTPSTAFKKEVEWQTNQMLLPFKRMCEQRKVHVDVVVIESDDVATAIADEVAKGAITKLVVGASSRGLFKSNRXGMSTKISVCTPRXCTIYAISKGKCXFHQHAY

SEQ ID NO: 279623 - protein, 53 aa, Glycine max
  Clone ID: PAT_MRT3847_94521C.1.pep
VKCPFFVHPGQVSSGSAHKCVSSWCVQTTCDSNLWSPCNQLPHLLLSHYYVHA

SEQ ID NO: 279624 - protein, 63 aa, Glycine max
  Clone ID: PAT_MRT3847_94522C.1.pep
GFNPFKTSHDNGHGITYISLGHYLGIGRHQRANAILGTIKMVLRVQVFTCLLLGIMAFFLDLG

SEQ ID NO: 279625 - protein, 60 aa, Glycine max
  Clone ID: PAT_MRT3847_94523C.1.pep
RWPRSCYRFLGGQSRLVLTRIQSSCVSATQPRWIGCSWTITRRNKSLTFLINLTGLSSCS

SEQ ID NO: 279626 - protein, 162 aa, Glycine max
  Clone ID: PAT_MRT3847_94524C.1.pep
GLETKKFETLLESTEYVLRGYKYRIPREGESNLGVAPHCDTAFLTILNQKVEGLGVKLKDGKWLEVGASPSLYLVMGGDALMVWSNDRIPACEHRVLMNSKIDRYSMGLLSYAAKIMEPQEELVDEEYPLRYKPFDHYGYLRFFLTEEAIKSDSRIKAYCGI

SEQ ID NO: 279627 - protein, 69 aa, Glycine max
  Clone ID: PAT_MRT3847_94525C.1.pep
KGQDASIVVNRTRGQTFQVLVNPNYASREDFPGSRFFLREGKVQKMMGPWWILGKPSDGLPYKWKDLKQ

SEQ ID NO: 279628 - protein, 78 aa, Glycine max
  Clone ID: PAT_MRT3847_94526C.1.pep
PLKQGFSPLGETRGGRVLQIFLGQGVKGNHLLPVSLGKKKTPRGAKKPTPFPRGVAPFLMQLGKQFFPLEKGLLGPTN

SEQ ID NO: 279629 - protein, 74 aa, Glycine max
  unsure (1)..(74): unsure at all Xaa locations
  Clone ID: PAT_MRT3847_94527C.1.pep
RRGSNNNNSPGTYRGKQTNILKSKEDARIXHKLHERKRKQRRSHEVHPGTADRETNERRASLEKATEGQGNTTE

SEQ ID NO: 279630 - protein, 59 aa, Glycine max
  Clone ID: PAT_MRT3847_94528C.1.pep
SDWVHEIRWGFKCGSVILSLMRRVLSGHLQPGRDQSIHEVCDQRRRAILLPLEMCPHPQ

SEQ ID NO: 279631 - protein, 62 aa, Glycine max
  Clone ID: PAT_MRT3847_94529C.1.pep
TARFINSDLVLRTRPQQRVAVPLVMGSQPLLYAMALIFRLDNDNFNNSHTIAEDLGTLITIS

SEQ ID NO: 279632 - protein, 66 aa, Glycine max
  Clone ID: PAT_MRT3847_9452C.1.pep
FGGTLRVLPGQFAFAAVEAGDYMTSFWAVDHNPVETLTVDFDWKTGVAAKDWSNVAKKGQVDVSTV

SEQ ID NO: 279633 - protein, 68 aa, Glycine max
  Clone ID: PAT_MRT3847_94530C.1.pep
NLSPSSTPEGSGRRTTKLMMKIRREEFFQRVAGAVASRSSVTIMGLTQNRSRQNTGEACCGCTMRRET

SEQ ID NO: 279634 - protein, 56 aa, Glycine max
  Clone ID: PAT_MRT3847_94531C.1.pep
LLLHVEELLNCPNILQYQQVLPQILICQRCPKVKGTDHRCTTKQFRVIELADTVIY

SEQ ID NO: 279635 - protein, 72 aa, Glycine max
  Clone ID: PAT_MRT3847_94532C.1.pep
PKRPGVGESQEQSHERGITLSSKKEKKREKVCGYLGRGAKEKRLRGKGPVRMPTKGLDITTRKCPCGEGTNT

SEQ ID NO: 279636 - protein, 71 aa, Glycine max
  unsure (1)..(71): unsure at all Xaa locations
  Clone ID: PAT_MRT3847_94533C.1.pep
KKRTLGSTHSYLYKWYFELGXSMKKLMILFYLLSCSVGSVAQDFWSLLESDEKNGITSYRRILIPNMSLYS

SEQ ID NO: 279637 - protein, 33 aa, Glycine max
  Clone ID: PAT_MRT3847_94534C.1.pep
MHSAQHVFCGEVTQRSASAVLDDMFIWGVVGMI

SEQ ID NO: 279638 - protein, 107 aa, Glycine max
  unsure (1)..(107): unsure at all Xaa locations
  Clone ID: PAT_MRT3847_94535C.1.pep
SLLVETLRFKLXEDTRQKLVASDNKVRQLETQVHEEKLATENEMKKVELEQQETRRLRKELESETTRPREEAWAKVSVLELEINAAMRDLDFERRRLKGARERLMLR

SEQ ID NO: 279639 - protein, 48 aa, Glycine max
  Clone ID: PAT_MRT3847_94536C.1.pep
VARVHADATATIVGESSDSKHLDTTSLQALLNCMSSTMATWVRHFSLN

SEQ ID NO: 279640 - protein, 249 aa, Glycine max
  Clone ID: PAT_MRT3847_94537C.1.pep
MALDQYFDEAVPQLDSLEDKSSLETWKCGSDDIADSDRNASGGFDCNICLECVQDPVVTLCGHLYCWPCIYKWLNLQTASSENEEEKQQCPVCKSEISQSSLVPLYGRGQTVLPSKGKGHQVGVVIPRRPLGPTLDSATVSPPISHVYHRHYPNHPQQFNSIPGSYTSMFNTGGSLANAFDTTYGVFGEMIYARVFGNQMTNTYTYPNSYDLSRNSNPRIRRHLMQVDRSLNRITFFLLCCIVLCLLLF

SEQ ID NO: 279641 - protein, 52 aa, Glycine max
  Clone ID: PAT_MRT3847_94538C.1.pep
MANVAAGSKKEWRDSDKAVTEEHKASQQMRLDTKMLQQNTQRQILSRLNLDL

SEQ ID NO: 279642 - protein, 160 aa, Glycine max
  unsure (1)..(160): unsure at all Xaa locations
  Clone ID: PAT_MRT3847_94539C.1.pep
MRCKKHLPDLTSTIGVCASCLRERLQPLLAAQAQAQAQSERSTTNSNVDNNHRRRKPKPKPEENPPPLNFPRSVSPYVTHRKSDYDRLRDRLFYSTPQVXGAACDGGTALEKRRHGRRVWILSNLFRARSNKTESSHEPREDPTGPHPPQSWFSTILYAR

SEQ ID NO: 279643 - protein, 69 aa, Glycine max
  Clone ID: PAT_MRT3847_9453C.1.pep
MEGKEQDVSLGANKLPERQAIGTAAQSQDYGRDYQEPAPAPLVDPTEGTSWSVYRAWIAEFVGTFLVLY

SEQ ID NO: 279644 - protein, 118 aa, Glycine max
  unsure (1)..(118): unsure at all Xaa locations
  Clone ID: PAT_MRT3847_94540C.1.pep
SARGPTSVPIHQLFFRSLPQPGGGSNHPSRHSTYKKEATLATELYQLKNFYLLTDINYKGFTFNHLQXLRKTLPETRYLILTNNTTVYNADNTTPWDTLNTFMNCLNICLYLHTKEIP

SEQ ID NO: 279645 - protein, 40 aa, Glycine max
  Clone ID: PAT_MRT3847_94541C.1.pep
KGSLTLISGGENLPDGFRVLKGWQFFSQNVVRASPFFFWF

SEQ ID NO: 279646 - protein, 49 aa, Glycine max
  Clone ID: PAT_MRT3847_94542C.1.pep
VLVPRFLVIAHQLSPVLSRTLESDKVPLLNNPNKACIYVIKVKAHWNEK

SEQ ID NO: 279647 - protein, 51 aa, Glycine max
  Clone ID: PAT_MRT3847_94543C.1.pep
FQCIITITHSRTFLNSGSTLPKNISSSHNSTPSSHPINILPFTKLFTILLT

SEQ ID NO: 279648 - protein, 41 aa, Glycine max
  Clone ID: PAT_MRT3847_94544C.1.pep
RILPSRWPCVLFFPQFRWSVNFLFHLTVSVCINSGNWTSSF

SEQ ID NO: 279649 - protein, 95 aa, Glycine max
  Clone ID: PAT_MRT3847_94545C.1.pep
GILHILSVIRLNQVRYKIVKPSSRADSIRYIQIQPNQTFVFSLESGSCFGNIYLDHHYFVLSFLIILLAVAKVPRLKYFDNIQHIKARHINVSMN

SEQ ID NO: 279650 - protein, 111 aa, Glycine max
  Clone ID: PAT_MRT3847_94546C.1.pep
KKGLLGMTLKITGHNDFFPKGLFNSPLLTSGLMFWEKFAYEATFGASLLGRKHAGTNPPWGLSGPLGTKTKALAPLGKPPLFDASFWIILTHLKTLSCQKETTNGTLGNFF

SEQ ID NO: 279651 - protein, 61 aa, Glycine max
  unsure (1)..(61): unsure at all Xaa locations
  Clone ID: PAT_MRT3847_94547C.1.pep
XXXLRGLXXXKEXLEFCFHGTEDXFAGFELGRWXXLRXXXXXPLPWXXLEXNSELTYXCXQ

SEQ ID NO: 279652 - protein, 59 aa, Glycine max
  Clone ID: PAT_MRT3847_94548C.1.pep
FSSSHLKVVGICRKLRVYIKVRLESLMFISKQHVQDEWTAVSHLYLCSILLTCCCLAGT

SEQ ID NO: 279653 - protein, 82 aa, Glycine max
  Clone ID: PAT_MRT3847_94549C.1.pep
VLLPHTTTTDTTTTALEQSHRRVWLEKPITERWSQFKFPSTRFRRRRSLRRRLSSDLRRAPFRSRSFMLLSPSSARTSSALR

SEQ ID NO: 279654 - protein, 107 aa, Glycine max
  Clone ID: PAT_MRT3847_9454C.1.pep
APLVRLPTTKVVKRAVTCVGAALALRKAACPAANGTRFCSAFATDACYVGFAASVTLFETRCGYWTLVAGRWCAINIGCYLQCSGYASLAPHTPQCTDSGTFLAIDR

SEQ ID NO: 279655 - protein, 61 aa, Glycine max
  Clone ID: PAT_MRT3847_94550C.1.pep
LIHARWAMLGAAGFIIPEAFNKYGANCGPEAVWFKTGALLSDAGTLIYIRDTYPRQISFLL

SEQ ID NO: 279656 - protein, 52 aa, Glycine max
  Clone ID: PAT_MRT3847_94551C.1.pep
IYSFFHTYMALLGSSMRVIILMVGEQETFADYLNGGQLTENSPPRIAVELCV

SEQ ID NO: 279657 - protein, 88 aa, Glycine max
  Clone ID: PAT_MRT3847_94552C.1.pep
SYSFQFQALFTIYAFHTFNLSLFFYITIIQLQLLFLIFTSSHISFSSLIYIPFILLHSHNSIPSYTPSSITFSSPYYSLNQLSIFLHF

SEQ ID NO: 279658 - protein, 87 aa, Glycine max
  Clone ID: PAT_MRT3847_94553C.1.pep
SDTTRIRFPLRYHRLFLISWLHLFLPSYLLLLALVSWSASFFCLSYLRYILTTYNLPRTAQVSPPLLSIISPPPPPPRRWYYTRVDG

SEQ ID NO: 279659 - protein, 29 aa, Glycine max
  Clone ID: PAT_MRT3847_94554C.1.pep
GYGCWKSTEWESLGHAGPPAEFKHINKGG

SEQ ID NO: 279660 - protein, 136 aa, Glycine max
  Clone ID: PAT_MRT3847_94555C.1.pep
YTPQATEQPKGRNNKKPIFKGRKKKKGITKKTGKANNTAETLNLEDGAAIGEVEAANKKGEDPTPQSQQKSEGDNCQNTEDQKPCHETQSSAKGKDTDETKGTHRQSGESHQGQRDQGPQHERQAQNRERRQRKRN

SEQ ID NO: 279661 - protein, 96 aa, Glycine max
  Clone ID: PAT_MRT3847_94556C.1.pep
GNGYIKKGTDSIQGQGCVCRQAGSERTPPSGTERQFPALFPMTHKKELENCFFVFFVFFFLTWGPPPNSVPKSPNTVRTGMFPAHRRLSVSRVSSA

SEQ ID NO: 279662 - protein, 115 aa, Glycine max
  unsure (1)..(115): unsure at all Xaa locations
  Clone ID: PAT_MRT3847_94557C.1.pep
YAPMHIFVDEGNWHRVCSXKLNKLGIDDFPIALFGFYAPRYNSKVSNHLTALAETLPYELSEALLMREPSLRNRIMWSVTVILYNTNTVESFHALDESDLLKKEAAMIWDDILSG

SEQ ID NO: 279663 - protein, 63 aa, Glycine max
  Clone ID: PAT_MRT3847_94558C.1.pep
ENPARTNPSDRLQKTYKREYILLINIRSTEDIQPCTILNTIVSTNNYYGPKKRKNMNKTKRPL

SEQ ID NO: 279664 - protein, 409 aa, Glycine max
  unsure (1)..(409): unsure at all Xaa locations
  Clone ID: PAT_MRT3847_94559C.1.pep
MTSTLLSLLFLLFSLLTPTLISSSPVLNPQEVVQEVNKKINGSIARPRRNLGYLSCGSGNPIDDCWRCDPNWEQNRQRLADCAIGFGKNAIGGRDGKIYVVEDDGDDDAVNPKPGTLRHAVIQDEPLWIIFARDMVIQLKEELLMNSFKTIDGRGASVHVAGGPCITIQYVTNVIIHGIHIHDCKQGGNAMVRDSPRHYGWRTXVSDGDGVSIFGGSHVWVDHCSLSNCNDGLIDAIHGSTAITISNNYMTHHDKVMLLGHSDSYTQDKGMQVTIAFNHFGEGLVQRMPRCRHGYFHVVNNDYTHWEMYAIGGSANPTINCQGNRFVAPDDRFSKEVTKREDAPESEWQGWNWRSEGDLLVNGAFFTASGAGASSSYARASSLSARASSLVGSITTGAGALSCRKGSRC

SEQ ID NO: 279665 - protein, 127 aa, Glycine max
  unsure (1)..(127): unsure at all Xaa locations
  Clone ID: PAT_MRT3847_9455C.1.pep
DSKAQATAMDVGAIEVITDRHACPDCNIAGATLLPDTDNTNPANAERRIXAAPIKGGRAIRXVHYPNTIVQIEPDMNLXFQLLSTTTTGDFGQGKDLAMTKDNAPCAAVGIASSLTSTALLGSESQK

SEQ ID NO: 279666 - protein, 90 aa, Glycine max
  Clone ID: PAT_MRT3847_94560C.1.pep
AHASVRLREDDRRVSKEVTKHEDAAESEWKGWNWRSEGDLLVNGAFFTASGAGASSSYARASSLSARPSSLVGSITTGAGALTCRKGSRC

SEQ ID NO: 279667 - protein, 94 aa, Glycine max
  Clone ID: PAT_MRT3847_94561C.1.pep
GESFSNIPTNAVNAVTWGVFPGKEIVQPTVVDSASFMVWKDEAFEIWSKGWACLFPEGDSSREILDKVQKSYFLVSLVDNDYINGDLFAAFKEI

SEQ ID NO: 279668 - protein, 262 aa, Glycine max
  Clone ID: PAT_MRT3847_94562C.1.pep
MEEVKLIATHQSFPCARVEWALRIKGVEYEYLKEDLANKSSLLLQSNPVHKKVPVLLHNNKPIAESLVILEYIDETWKKNPLLPLDPYERAQARFWARFIDEKCVLAVWGATVAQGEEKEKAVGAALESLALLEKEIQGKKYFGGEKIGYLDIAAGCMSLWFSVLEELGEMELLNAERFPSLHEWSYNYIAAGCMSLWFSVLEELGEMELLNAERFPSLHEWSQNFLQTSPVKDCIPSRESVVEYFSFGINYVRSLAASSKS

SEQ ID NO: 279669 - protein, 49 aa, Glycine max
  Clone ID: PAT_MRT3847_94563C.1.pep
RDKGSPCRAPVVKLFDGAPVFIFGRRLFSVSGLSFFFFFLFFFFFFFFF

SEQ ID NO: 279670 - protein, 64 aa, Glycine max
  Clone ID: PAT_MRT3847_94564C.1.pep
KGKNQEFFFPPPKKNLGPALFHREPPPEKNGLGSGQGPQTLPKPNKPPLIALAPPRGKWGPRKN

SEQ ID NO: 279671 - protein, 168 aa, Glycine max
  Clone ID: PAT_MRT3847_94565C.1.pep
MGSTLASFMFLWTIMRQYCPYGVQRFFEKYTHRIMSYFYPYIRISFHEYMGDRLKRSEAYAAVEAYLSANTSKSAKRLKAEMGKDSSNLVLTMDEYERVTDDYEGVKVWWVSSKVMSPTRSPMSYYPEQEKRFYKLTFHSKHRDTITGSYLEHVMREGKEIRLRNRQR

SEQ ID NO: 279672 - protein, 107 aa, Glycine max
  unsure (1)..(107): unsure at all Xaa locations
  Clone ID: PAT_MRT3847_94566C.1.pep
MANQLTDEQISEFKGAFNLFDKDGDGCLTTKELWTRIPSLGQKPTKGWLPDLVHQIKSXGKGPFDFPKFLNLLAQKIKETVFEEELKEAFKGFDKDQKGFIFAVELP

SEQ ID NO: 279673 - protein, 37 aa, Glycine max
  Clone ID: PAT_MRT3847_94567C.1.pep
ASTMEQRQGHISTSPILHFLLLKRGTIEADLVQCFLK

SEQ ID NO: 279674 - protein, 50 aa, Glycine max
  Clone ID: PAT_MRT3847_94568C.1.pep
PCSKTDVLVSVRQGVCSLNQVLYQPATVFCLITARSLKKFFTRFQRNPKT

SEQ ID NO: 279675 - protein, 79 aa, Glycine max
  Clone ID: PAT_MRT3847_94569C.1.pep
ECRAGFVEIAATVTATAVSTSTILTRAMSIRQPQHLLVLIVSSFLLYFFFYSFYLSFNLSHIPLLSLFFIFSLFILFLI

SEQ ID NO: 279676 - protein, 120 aa, Glycine max
  Clone ID: PAT_MRT3847_9456C.1.pep
CTLTFLLKKKTNHDATALVHILFIVWPKCLDETTVIIKKKHDKGRCFLNHIGQIISLCSFYVAHPRFCLIFPEVKAVFVFPLASMQRESNMGVAFGNFASESLFFPFNTIGSHSQTYTKL

SEQ ID NO: 279677 - protein, 59 aa, Glycine max
  Clone ID: PAT_MRT3847_94570C.1.pep
FPQLKEVGKFSNMQNLLNKRAMPNFLSWIKQTRPRRKTPISQHAEDSPFSKKLAISLGT

SEQ ID NO: 279678 - protein, 28 aa, Glycine max
  Clone ID: PAT_MRT3847_94571C.1.pep
QPRLTDEYPPHFCLIPKGGARWSLQRKT

SEQ ID NO: 279679 - protein, 65 aa, Glycine max
  Clone ID: PAT_MRT3847_94572C.1.pep
PSLLLNPPHSHYANTYADTLHFRILPILSVSIGRKSFFFFAPLQIGYTLLLSVNSYTSSYYSSLF

SEQ ID NO: 279680 - protein, 100 aa, Glycine max
  Clone ID: PAT_MRT3847_94573C.1.pep
YYILMKVISKTPTQLVSILCQFNLHSCNKHRQKHLYIHVISSVLISFPRKRPLQSPKKIQHQALSELPFNSKHNENRTSLILYRTVQYVSVANRQDFQNL

SEQ ID NO: 279681 - protein, 70 aa, Glycine max
  unsure (1)..(70): unsure at all Xaa locations
  Clone ID: PAT_MRT3847_94574C.1.pep
XISSSLLXXXXXXXXXXLFFYHGFSSFSHRMFQTHEDHDPHQLHLRSXSTSLNAFPSXPXHXVQGXXGLM

SEQ ID NO: 279682 - protein, 55 aa, Glycine max
  Clone ID: PAT_MRT3847_94575C.1.pep
TFLWLLRPLARTMRRAPYKIIITLLLVLEGKVPWIHGFALLNRLNRVQKLVIITW

SEQ ID NO: 279683 - protein, 70 aa, Glycine max
  unsure (1)..(70): unsure at all Xaa locations
  Clone ID: PAT_MRT3847_94576C.1.pep
AXVVDYLXIRXRSQTTLHVDGXVGRVVGLEVAYVLHSKGHSXTTLALLKCXAVVGRGFPWPLASHNSXTS

SEQ ID NO: 279684 - protein, 40 aa, Glycine max
  Clone ID: PAT_MRT3847_94577C.1.pep
KKIIKTILTYESINSKPIKPKQNSSSFNSNDQSRGGGLYI

SEQ ID NO: 279685 - protein, 88 aa, Glycine max
  Clone ID: PAT_MRT3847_94578C.1.pep
RCLILTKQGAILSAALPGLQEKGVALTKVPKVKFLIIVGGAKFRSPSVMDKAYSSSISCPSLHFIGTSVSTFYFIILFCHWYFLRKHT

SEQ ID NO: 279686 - protein, 134 aa, Glycine max
  Clone ID: PAT_MRT3847_94579C.1.pep
MSFHPNPNLNTAATTEPLNHMVLAMHLSDPKSKTLTLIPNSTLIILDRTLLLSDELLLRILSKLPDSSQQRNSNSLVCKRWLNLQGRLVRTLRVLDWSFVLSGRLINRFPNLNHVDLVQARLLLLLSTRQLPLW

SEQ ID NO: 279687 - protein, 122 aa, Glycine max
  Clone ID: PAT_MRT3847_9457C.1.pep
VLFFFFFFFFFFFFFFFFFFFFFFFFFQIKGAPLPQNFWGKPPLLKNLEKTPQTGHFFLAPKTLETLKRFPPSPIKTFTPGTSPTLGNKNFSWPSLFGPQFKIGKKSPCKKHPRWHFQGHPF

SEQ ID NO: 279688 - protein, 133 aa, Glycine max
  unsure (1)..(133): unsure at all Xaa locations
  Clone ID: PAT_MRT3847_94580C.1.pep
MRSTTNMELSREVPVVELYHRLTLLVTDFAQITAIDIXGGQRELPYHLQVITSEXNSLSLPALLQAYMDSXCLTGSGKMTWTYDDGTNAIRLREGDVXHLKEGSGLYIQSNSKGERTKRNDLSQRLPTQTTFL

SEQ ID NO: 279689 - protein, 62 aa, Glycine max
  unsure (1)..(62): unsure at all Xaa locations
  Clone ID: PAT_MRT3847_94581C.1.pep
NFXXGFPXPIFQAETLQATKPTXPIXGXXTXPRGXXVPFYGXXXGXKXXRSFNGXGVXXADF

SEQ ID NO: 279690 - protein, 155 aa, Glycine max
  unsure (1)..(155): unsure at all Xaa locations
  Clone ID: PAT_MRT3847_94582C.1.pep
GSSARPVPPIPVALFVAMAALRSSARLAAPLPRAALRLPARRAYATSPAPGAHPPPQQGGSRSQGTSKTLIGSVALLAAAGGAFLLFGPENKRADLGVGPDGSNKLSGSGAKAQRAXTYKGVGPSLDADPXDYQTVYNAIDDKLDSNPEYDDGSY

SEQ ID NO: 279691 - protein, 93 aa, Glycine max
  Clone ID: PAT_MRT3847_94583C.1.pep
GAFIEQCWFLPPAKRPQFWPVVKVLNPFGFSPAPEGTLPRGENPCCPVHKKGVFPWFQKVGPGPHKKGPGPNPKFPWVFKGAGLFVVTRVPWN

SEQ ID NO: 279692 - protein, 51 aa, Glycine max
  Clone ID: PAT_MRT3847_94584C.1.pep
WPNYQNDESEIPNSHFNLPKPSNKTKPFPFAKLFLLSFHRAWFHPFPLRPC

SEQ ID NO: 279693 - protein, 228 aa, Glycine max
  Clone ID: PAT_MRT3847_94585C.1.pep
RRPTTRSPQCRGCKGGDEYDYLFKLVLIGDSGVGKSNLLSRFTRNEFNLESKSTIGVEFATKSLNIDAKVIKAQIWDTAGQERWYRAITSAYYRGAVGALLVYDVTRRATFENAARWLKELRDHTDPNIVVMLIGNKSDLRHLVAVPTEDGKSFAEKESLYFMETSALEATNVENAFTEVLSQIYRIVSKRAVEARNNASSSAVPSKGQTINVKDDSSVLKKIGCCSN

SEQ ID NO: 279694 - protein, 218 aa, Glycine max
  unsure (1)..(218): unsure at all Xaa locations
  Clone ID: PAT_MRT3847_94586C.1.pep
MAGYKGDDEYDYLFKLVLIGDSGVGKSNLLSRFTRNEFNLESKSTIGVEFATKSLNIDAKVIKAQIWDTAGQERYRAITSAYYRGAVGALLVYDVTRRATFENAARWLKELRDHTDPNIVVMLIGNKSDLRHLVAVXTEDGKSFAEKESLYFMETSALEATNVENAFTEVLSQIYRIVSKRTVEAGKNASSSAVPSKGQTINVKDDSSVLKKIGCCSN

SEQ ID NO: 279695 - protein, 49 aa, Glycine max
  Clone ID: PAT_MRT3847_94587C.1.pep
YILTLQYTKGSTQNHSFNYKSYQTKKSLLLIKISNYNIKDSYKTHNKTY

SEQ ID NO: 279696 - protein, 75 aa, Glycine max
  Clone ID: PAT_MRT3847_94588C.1.pep
CLPPLVLLLIAFATSVSGRGDLTGYYARVASEADHDDNCKGTRWADLLAGHNGYWIYRPQADVRCAYHIWRMGGP

SEQ ID NO: 279697 - protein, 60 aa, Glycine max
  unsure (1)..(60): unsure at all Xaa locations
  Clone ID: PAT_MRT3847_94589C.1.pep
IASDILGCPLSAIIYESTFSPFIPFDVHPSFSSPSSSSSSSSSSTYMHLIHAIPIYXKCT

SEQ ID NO: 279698 - protein, 123 aa, Glycine max
  Clone ID: PAT_MRT3847_9458C.1.pep
VAWAENTGIALACAMNSSFRGRASFDIYTICSQDCELWNPACTKAMTMLFNTNPCSDAWSVEFPERTGFHCDLICGTGWTATPMQDAQATTDWVIYCQECVPSTYCSFNPQNTFVLNRWMGKL

SEQ ID NO: 279699 - protein, 42 aa, Glycine max
  Clone ID: PAT_MRT3847_94590C.1.pep
RDTSHDPCTGSSQSRLKNTQVIDHIEDYPTANCWKQRFNIKW

SEQ ID NO: 279700 - protein, 75 aa, Glycine max
  Clone ID: PAT_MRT3847_94591C.1.pep
SLYILCSSISNVFSLFGHRESGVCVFLLRFARNPLKDEEREIYVDLVLFRKRHRSFVEARVPLPSHTLHATLAPG

SEQ ID NO: 279701 - protein, 43 aa, Glycine max
  Clone ID: PAT_MRT3847_94592C.1.pep
HQRLHIFEKCFCFFSIQFNLNIQTGKSFIQYHIIIIIVNDISF

SEQ ID NO: 279702 - protein, 59 aa, Glycine max
  Clone ID: PAT_MRT3847_94593C.1.pep
LLQIRSIATKCKILSVHVYTSEQHTLQRMQPELVISLHVSFTSSWHTPSECQLGQVVKH

SEQ ID NO: 279703 - protein, 121 aa, Glycine max
  Clone ID: PAT_MRT3847_94594C.1.pep
QQQTPTKTGPHANNNNNNNNNNNNKAQQPRAPNALHLPMPMSVFAKASYANNATAAAPRTTHQHTRCAHANAANTYSAGQLELCIYQLLLLQPLQLSHNLNMVFKHNIWCWFQFLNLLLNL

SEQ ID NO: 279704 - protein, 75 aa, Glycine max
  Clone ID: PAT_MRT3847_94595C.1.pep
LYSLNHHNHHPPLLQNTPPLNCQDTCKVCLNPVDIYRTSSQHLLAHLKLPKEHPRRAPDVPSTLNNMTTTAPPKG

SEQ ID NO: 279705 - protein, 158 aa, Glycine max
  unsure (1)..(158): unsure at all Xaa locations
  Clone ID: PAT_MRT3847_94596C.1.pep
IRLEYGCEKTTEGGFCFRCVVDEVSKGTSNSVERTTVECNADNHNSNSDCHAEDSFSGKVSVSVADTGETAVVVSMVDQTKWVPSTSEKSLLPFEVGEDPMTESCILMSVTSDQQSGEVKTETNTLPVMEEELELSXSNNISCSVTSKXSVHNDLKKN

SEQ ID NO: 279706 - protein, 84 aa, Glycine max
  Clone ID: PAT_MRT3847_94597C.1.pep
EPFKAFFGPGGKDPPHFPLGWGGKNKGPGKEILVGKPCKDPFVWVNWEGGPYPPGGNKRGFGPIFEGSFFEPPIPLNMACHKPL

SEQ ID NO: 279707 - protein, 97 aa, Glycine max
  unsure (1)..(97): unsure at all Xaa locations
  Clone ID: PAT_MRT3847_94598C.1.pep
KKKIFLPNGEKKNFFFKKAPPXFFYILLKIFFYFYPNLYFFSGILFYFFFFFFFFFFFFFFFFFFFFFFFFFFFFFFFGKTKFYISNKIVMLPKIQR

SEQ ID NO: 279708 - protein, 106 aa, Glycine max
  Clone ID: PAT_MRT3847_94599C.1.pep
IEFCSHHHNNPMREIEKPLKSSDMHDVVSDWDANFVDIEQDILFELILAANYMDIKSLLDLACAKVASMIKGKTPQEIRETFNIVNDFTPEEESQIREENKWCEEA

SEQ ID NO: 279709 - protein, 77 aa, Glycine max
  Clone ID: PAT_MRT3847_9459C.1.pep
RSVIEKFYPRSHIPDRRVGALIQNFTSLNLKLSRELRKKQKKFKSDTKVLYQIGECSANKLRVVKKVIHEVCGQHRE

SEQ ID NO: 279710 - protein, 57 aa, Glycine max
  Clone ID: PAT_MRT3847_945C.1.pep
PPLPPFFLSYSQTLPCLLMKYRTSAVLAMASTFLWCVRRVKKIVPTWWLQKDFNSNM

SEQ ID NO: 279711 - protein, 97 aa, Glycine max
  Clone ID: PAT_MRT3847_94600C.1.pep
GEHQKERMATVFGMEKFNRTHCSMGTQRGHEKSPMNALHVYRPYINTWKRPKIPFLRRDIGNQLDYSYFSPWDYHRLKRVHPVATSLTFSIRHLEPN

SEQ ID NO: 279712 - protein, 81 aa, Glycine max
  unsure (1)..(81): unsure at all Xaa locations
  Clone ID: PAT_MRT3847_94601C.1.pep
KFLKGFNAVSKKLXKEPGEGPMNPVGGLKQVVLSGLKRKGLDYSQENVEGPFXTGQKPGIISGIRFGVLILGLDSSYATKF

SEQ ID NO: 279713 - protein, 87 aa, Glycine max
  Clone ID: PAT_MRT3847_94602C.1.pep
VGEVNVTLDWKIGIPAQDWDSVPKKEKIEGVELDLKKVEGSVEAIHESLLYFKGREAYMRTVSEKTNGRAAGFSIMSFPMRPPVFGF

SEQ ID NO: 279714 - protein, 67 aa, Glycine max
  Clone ID: PAT_MRT3847_94603C.1.pep
NVFVFRITKFFFCFSTINLAIEIRTGLLFCIHVWIKLLNYKCATYVRPQSVMRFYSNDKDQTDNVYG

SEQ ID NO: 279715 - protein, 51 aa, Glycine max
  Clone ID: PAT_MRT3847_94604C.1.pep
PADSSHAFEPEDHSEDFSQDEEDNLSENLLMTFPSSCCLQEFSGELAKQCS

SEQ ID NO: 279716 - protein, 86 aa, Glycine max
  Clone ID: PAT_MRT3847_94605C.1.pep
LAIYGQPLSSIIAPLQSDVYFYCMSSAMAPRESPLVSIWMHTLGPDPLPSGHYSATNSHRGSLASYLGSPEMATEAVMYSYHEYLN

SEQ ID NO: 279717 - protein, 93 aa, Glycine max
  Clone ID: PAT_MRT3847_94606C.1.pep
KKNGGSWKATFQRANLFGDFDFTFICQLGNPFGLSSYYHNTQHLKRWMPFNPSIYLAPLPPVYRCKLLFLKNFQKTLPVSFKSNLLSFYSAIT

SEQ ID NO: 279718 - protein, 60 aa, Glycine max
  Clone ID: PAT_MRT3847_94607C.1.pep
WTHDGTKSTRMRLLTHPSSDTWWDRHWKSCGLPSGIIRVTGWTDTSTQEGKVTIVGTIWL

SEQ ID NO: 279719 - protein, 74 aa, Glycine max
  Clone ID: PAT_MRT3847_94608C.1.pep
WLPFRCFGEMATVYRERRKGGAGSFLGWACFRPACGSFFSLVYPLFVERLGSWGLAVILLSGLEEFPYFRRVRT

SEQ ID NO: 279720 - protein, 45 aa, Glycine max
  Clone ID: PAT_MRT3847_94609C.1.pep
SHLRPLHALNAAYALGECSHWLNTATHVQGRLASYTLAQAVNVVF

SEQ ID NO: 279721 - protein, 95 aa, Glycine max
  Clone ID: PAT_MRT3847_9460C.1.pep
FNACKWPKWDPHSWELIFPIKVCGPKKGFEMWSFKWANQTSWPLSFLIANPKQFTVFEILLGISQDFEIAGKTLMPAFFVPQATARFFENAESSA

SEQ ID NO: 279722 - protein, 89 aa, Glycine max
  Clone ID: PAT_MRT3847_94610C.1.pep
KKKPPPPPPRGVKTPPPPRGGVYFFFFSPTPRGGGKKKKNPPPPDPKKKKHPPPPPPRGRPGTPTIFSPPGGGGGGGGGPVPPPGAGGG

SEQ ID NO: 279723 - protein, 37 aa, Glycine max
  Clone ID: PAT_MRT3847_94611C.1.pep
CGNGFCREFLFSRRAFYLIRFIKVLTERIIHLKMKAC

SEQ ID NO: 279724 - protein, 77 aa, Glycine max
  Clone ID: PAT_MRT3847_94612C.1.pep
MPPKTFTIQLLLETILSGNSTSWPSDRQERFVRRWVDALSDPRVTHEIRSIWISYWSQADRSLGQKIASHLNLKPSI

SEQ ID NO: 279725 - protein, 501 aa, Glycine max
  unsure (1)..(501): unsure at all Xaa locations
  Clone ID: PAT_MRT3847_94613C.1.pep
MDPYKNRPSSAFNSPFWTTNSGAPIWNNNSSLTVGSRYWELNWGMXGPILLEDYHLVEKLANFDRERIPERVVHARGASAKGFFEVTHDISHLTCADFLRAPGVQTPLIVRFSTVIHERGSPETLRDPRGFAVKFYTREGNFDLVGSNFPVFFVRDGLKFPDMVHALKPNPKSHIQENWRILDFFSHHPESLHMFSFLFDDVGIPQDYRHMDGFGVNTYTLINKAGKALYVKFHWKTTSGEKSLLDDEAIRVGGSNHSHATQDLYDSIAAGNYPEWKLYIQTLDPENEDRLDFDPLDVTKTWPEDVLPLQPVGRMVLNKNIDNFFAENEQLAFCPAIIVPGVYYSDDKLLQTRVFSYADTQRHRLGPNYLQLPANAPKCAHHNNHHDGFMNFMHRDEEVNYFPSRYDPVRHAEKVPVPPRILGGKREKCMIEKENNFKQPGERYRSWPSDRQERFVRRWVDALSDPRVTHEIRSIWISYWSQADRSLGQKIASHLNLKPSI

SEQ ID NO: 279726 - protein, 61 aa, Glycine max
  Clone ID: PAT_MRT3847_94614C.1.pep
IPFSNVVYIEHSDFRMQDSKDYYGLAPGKSVILRYAFPIKCTEVILADDNETILEIRAEYD

SEQ ID NO: 279727 - protein, 104 aa, Glycine max
  Clone ID: PAT_MRT3847_94615C.1.pep
LYCVWGAIASFVAWCGCVDIYSSAFVLVIFRAVARREARRALIVLGEREPLTRVPPRVNSEGPILIRYRREDYSLYYRPLLSLVEGSGIPYCPLLSSSHDHAST

SEQ ID NO: 279728 - protein, 184 aa, Glycine max
  Clone ID: PAT_MRT3847_94616C.1.pep
SSRPVAPNTVVYNTLLHALCRNGKVGRARNLMNEMEDPNDVTFNILISGYCKEGNSVQALVLLEKSFSMGFVPDVVSVTKVLEILCNAGRTMEAAEVLERVESMGGLLDVVAYNTLIKGFCGAGKVKVGLHFLKQMENKGCLPNVDTYNVLISGFSESGMLDLALDLFNDMKTDGIKWNFCTFD

SEQ ID NO: 279729 - protein, 71 aa, Glycine max
  Clone ID: PAT_MRT3847_94617C.1.pep
AFYPPGVNFPRMAHGFRLTPNFLGPRTWLGLCLVKGLTILQGGLGYGRGLLGQNPFSLFFFYLKFCLYPNI

SEQ ID NO: 279730 - protein, 205 aa, Glycine max
  unsure (1)..(205): unsure at all Xaa locations
  Clone ID: PAT_MRT3847_94618C.1.pep
VLAVLAQVQVPSQNARPGPNGGGAAGNTVTTTSVYVGNLYPNVRDAQLNDLNNQXGQVVNVRVCTDXTRKRSIGYGDVNFNNQKDACRDKHVLKLTPLNIRRIRIMHMHTDPSMQDSGQRNIFIKNLDKAIDHRSXHDTCITLSGIXTPWQRNLHDPSXGNAKCFRLSSNLIMKNLAKRLIVTLSGMLLYDKQVYVGPFLSKQER

SEQ ID NO: 279731 - protein, 60 aa, Glycine max
  Clone ID: PAT_MRT3847_94619C.1.pep
TLVYMHNYRRGIYPSTEGLMFLRKLPWLAVCASLGHSCSSKMRVKGAILIKPRRAHVGDD

SEQ ID NO: 279732 - protein, 42 aa, Glycine max
  Clone ID: PAT_MRT3847_9461C.1.pep
WIFIWHGEIRPNRAPDSQSKLSTGYALPFLRESTGVCYAECS

SEQ ID NO: 279733 - protein, 73 aa, Glycine max
  unsure (1)..(73): unsure at all Xaa locations
  Clone ID: PAT_MRT3847_94620C.1.pep
KLYQDMESRIXNAANVVQVPGEFQTKGKAFYQYYSYTSRRNHYTILQILLHVKDSITQNVYRNDIPILLYFPL

SEQ ID NO: 279734 - protein, 43 aa, Glycine max
  Clone ID: PAT_MRT3847_94621C.1.pep
NLQKLGIKGGPRLSNLFSTRINFRPVPDGIPTFPYREAIKTWP

SEQ ID NO: 279735 - protein, 108 aa, Glycine max
  unsure (1)..(108): unsure at all Xaa locations
  Clone ID: PAT_MRT3847_94622C.1.pep
LEVAYRFILYAWHASGRIILCQPWHVGRAYDPGHQPXGSTPSSCISMPISVRWRILLPDGCYSVYPEPRALRTVEMPELVQHHRQSAINAIRARFERIGIDGAHRYLI

SEQ ID NO: 279736 - protein, 61 aa, Glycine max
  Clone ID: PAT_MRT3847_94623C.1.pep
GSHVTEKKKMHSFGGLSGGAQKAKSMSLPCIWSLNLGTGLLFSFTGARMKIGDKKLFHFFL

SEQ ID NO: 279737 - protein, 48 aa, Glycine max
  Clone ID: PAT_MRT3847_94624C.1.pep
KEKDHLPKLLFLHMQESETIAVEINGPGMQLVERKTVVAQKCLKCNHR

SEQ ID NO: 279738 - protein, 62 aa, Glycine max
  Clone ID: PAT_MRT3847_94625C.1.pep
MDSGFRLLELASLINRFQTFTYLLHKLYISHVIVRASRLKRPQDQEISPRSRSFFFIKTIFC

SEQ ID NO: 279739 - protein, 209 aa, Glycine max
  Clone ID: PAT_MRT3847_94626C.1.pep
MDPPYGNNTNTTNNNNNNANPLSSTKLSQSEGYYLPSFSINNNHHQLLIKPEDHHNHRIYEFPTINFTSNQTNLSSNNVNPMGNNNTLSSQPLNMFSADYYVHQNRIKSSIMPSVAGSGFVSDNNNHDEAILRAFAAKNNEHIQCKMEQFSSNHSQDTGLSNDRNTTDTSSVVSMGRNNNNRALYEDLEGPSSVAPLSDLECLQWDDDY

SEQ ID NO: 279740 - protein, 67 aa, Glycine max
  Clone ID: PAT_MRT3847_94627C.1.pep
SIFLRLATALPRISLTHSAGLTGFLYNTCFSGHYPFVLHPKEVSVFSYYDRLGPSKAEWLIRGLCDR

SEQ ID NO: 279741 - protein, 141 aa, Glycine max
  Clone ID: PAT_MRT3847_94628C.1.pep
IIYFMVQFHPGLSNCAFFCINLFCCLSVVECCIMIVASVVPNVLMGIGTGTGVIVFMMMPSQIFRSLPDIPKFFWRYPMSYLSFAAWAVQGQYKNDMLGVEFDPLLPGDVKVSGEQVLSLVFGVPLDHNKWWDLTALATLL

SEQ ID NO: 279742 - protein, 47 aa, Glycine max
  Clone ID: PAT_MRT3847_94629C.1.pep
RIFVKKVISLSCFSIFLYQKVLPKNCYCRKKKGEALGVAPDFRPDRT

SEQ ID NO: 279743 - protein, 251 aa, Glycine max
  unsure (1)..(251): unsure at all Xaa locations
  Clone ID: PAT_MRT3847_9462C.1.pep
ALLSAQAYGETTLSFDGCPYLFAMAHDSSVSTRPGDFVIGVKLTTMNNMCAYGLNPGIAGSRTLGTIPESISQQTVXNQMATGRTPLNCDSSKQSFCQLSIDLVCGGTLVDKTGDWITLIQKSPISNLLRVAAWKKGCTMVKIAMSGNASVKRSDWASLVQVFLTNSYSAEHFDACTWTKSEPLSWELIFPIDVLGPXNMVFEMWSFGGANLTCMXWSFFLDHPKRSTVFDISLGIFPKFXIGGNTFYAAF

SEQ ID NO: 279744 - protein, 69 aa, Glycine max
  Clone ID: PAT_MRT3847_94630C.1.pep
PSLPFGISIGETRRRGTSIADDDAQRHIIDNHIFYTLSPEYFPKLKTLIFFNFFWALLNRGEECGVWNG

SEQ ID NO: 279745 - protein, 233 aa, Glycine max
  Clone ID: PAT_MRT3847_94631C.1.pep
MEKTSWACTVITQVCLCFALYIALNLGQPQTSDLYFISVKGGFRPFTQQLHLLKQMDKVAKAYNASFVVSSSELGEYDSLMQNATQHFPSLRLPWYTTYTTTTSSKTKGQEVGCFSKKITTSNRITSGVIGVDTELLKDYVLRGSLSGNKINQLHWLIKTLAANSSNWRIIVGYHSREPYSIFLNGNSVFKRELANGFLLHHVSSDQIVTNYINFAGEVVCTAVLQQKGREIM

SEQ ID NO: 279746 - protein, 55 aa, Glycine max
  unsure (1)..(55): unsure at all Xaa locations
  Clone ID: PAT_MRT3847_94632C.1.pep
ELAFPGFAQPVSYLFNSPTKSFLVDGQPKKKNXGDKGNKGPLSSNLRAFSLISME

SEQ ID NO: 279747 - protein, 96 aa, Glycine max
  Clone ID: PAT_MRT3847_94633C.1.pep
AGKFGAVCLIAFAIDLTIFNVLRETDVEPLLAKTVSTVIATTVAFLGNRFWTWRHGAHDHMARQYTMFFVLNAIGLGIALTCLAISHYGLGQIWPV

SEQ ID NO: 279748 - protein, 41 aa, Glycine max
  Clone ID: PAT_MRT3847_94634C.1.pep
KSHIQFKRVHEPINVWREYRVIFSPQISRKGAMLFLKVLSS

SEQ ID NO: 279749 - protein, 207 aa, Glycine max
  unsure (1)..(207): unsure at all Xaa locations
  Clone ID: PAT_MRT3847_94635C.1.pep
RPDGHSKKYEGRHWVPIGWAIIPKLDQSVHVDADWPSHESELEDSEDDCTAPYLAPPYXEPPAGPIWWCHVFARHPTVEARLITAHWLHPAVTLALKDKSSLISERMKHLLYEVPFKIARRLSFDLLGQSTGDPVVKKYDIPIVLMSWQPQNFLETVMHIKGSLSTVTVLGITEAQDLLSAGWYNLPKTEHEGLALLACLLXRWDDR

SEQ ID NO: 279750 - protein, 92 aa, Glycine max
  Clone ID: PAT_MRT3847_94636C.1.pep
PSGSSSPTVNVFCFLSVDVLAASQESLTPLSVFSGHGYFQRMATTTTEFDLDYEFPDLDYDLRYLSLAGIDALTAFQNLLPERICTLLKGKI

SEQ ID NO: 279751 - protein, 82 aa, Glycine max
  Clone ID: PAT_MRT3847_94637C.1.pep
TKKEKTFLGSGFFFPQKRGIFKIFFGAYYKGSGIPGAPQSFLKKAPFFFPGLKALLKRGGVFCLPPIQGAKIFGGNMGPQFP

SEQ ID NO: 279752 - protein, 154 aa, Glycine max
  Clone ID: PAT_MRT3847_94638C.1.pep
WFEMLFLTILLFLFFFSNAEKLTFVGGHSFNEMGEFRVKFRQLEADIEELKGKNEAIQKRLVEFEQKLSTSANYTRIVSGQEMIRILAKNNWNQTDSHKELFLFKPNLLKVVCLGAEKVPRTVRAKDRAPKNLEIVYYEVKTLSAEQKILMEPK

SEQ ID NO: 279753 - protein, 44 aa, Glycine max
  Clone ID: PAT_MRT3847_94639C.1.pep
RFDRHYHAQRDSKERPHGFSGYQASGIGTPSFKNLHSLYECSSS

SEQ ID NO: 279754 - protein, 88 aa, Glycine max
  Clone ID: PAT_MRT3847_9463C.1.pep
FQESSNFLLLLGVRFLKGKKITLCAGHRLRESFSFPLLVYLLNTLLFDIGLRVRFKLFSVSCLRSLLKFKFKAGENFGLSASHLSYLV

SEQ ID NO: 279755 - protein, 62 aa, Glycine max
  Clone ID: PAT_MRT3847_94640C.1.pep
QNIEQQFLTILYVQLPERIIRGLIGIITRTGLLELQTLLMMGLDLPRSWPCHLKRTNLCYWA

SEQ ID NO: 279756 - protein, 54 aa, Glycine max
  Clone ID: PAT_MRT3847_94641C.1.pep
IYHLFFTYILHKARKEHITLKSVFTSDLIAIFLSDKACAFHSSPIKCTLSLLNT

SEQ ID NO: 279757 - protein, 135 aa, Glycine max
  Clone ID: PAT_MRT3847_94642C.1.pep
SSFKPLIGTLKRAPLFKLYRENPPTLPKKKGKKPKDRALRPLQILPFPFALPPPPPRFIRPFKGGSHFPLRLANFLKSHSFRPFFFLPHLAKGDFFPSHLILLTPGFFHSDFFKPPPLYFIFVALLKNFFLSFPR

SEQ ID NO: 279758 - protein, 66 aa, Glycine max
  Clone ID: PAT_MRT3847_94643C.1.pep
ELGLRSYIAPEIGCEVIILSAWAVQQPWTLACANDSLAKSKDFDGEGTLTYPSATEAAQTRCPRLV

SEQ ID NO: 279759 - protein, 61 aa, Glycine max
  Clone ID: PAT_MRT3847_94644C.1.pep
ISMQYLGVFGRREIIYQINFVFYSVGLRPLTLYFNSKNSLLFLSSKPNTLLGILFQMKMAA

SEQ ID NO: 279760 - protein, 87 aa, Glycine max
  Clone ID: PAT_MRT3847_94645C.1.pep
EDHCDLKMVAVYSFSSPRICLLVSWIDLWAACAVGPLLAETGIIIITSALSTLRLPSRFLFSSNMMGSRPRMHQNGHQDGGRRTENG

SEQ ID NO: 279761 - protein, 216 aa, Glycine max
  unsure (1)..(216): unsure at all Xaa locations
  Clone ID: PAT_MRT3847_94646C.1.pep
VDPTASATQLGSRFPPTLLSLFLSSSAPSIHLIVLLATMATENPFNSILRTLEKPGGAGEFGKYFSLPALNDPRIDRLPYSVRILLESAIRNCDEFQVKSNDIEKIIDWENTSPKLVEIPFKPARVLLQDFTGVPAVVDLACMRDAMNKLGGDSNKINPLVPVDLVIDHSVQVDVARSENAVQANMELEFQRNKERFGFLKWGXNAFNNMLVAPPG

SEQ ID NO: 279762 - protein, 53 aa, Glycine max
  Clone ID: PAT_MRT3847_94647C.1.pep
IFCQEEPALKWLPVREVLTGNYFEILHVTNNRFYLLKVGFFSKKKKKEKAAHD

SEQ ID NO: 279763 - protein, 50 aa, Glycine max
  Clone ID: PAT_MRT3847_94648C.1.pep
VIFEAPQLKVGSWQVQYGGQSEVKLRIAYVDEKIRLGLGSKGSLFVFQRI

SEQ ID NO: 279764 - protein, 252 aa, Glycine max
  Clone ID: PAT_MRT3847_94649C.1.pep
MPDREVNESVNGNSGEGNDAMEVGEEFDRGIMSKEQVVDVSDGVNYSVAGLLSGGQKCGGNDDKGLVLDPSGGDSDGRKRKRDMLDLSDGDSDSDSSDRKRMREFALDMLSWVTGAAKNPCDPEVGSIPEKAKWKSYSNQEVWKQVLLFRESAFLKRGSDPSSEQRSWQSQKMHPCLYEDHLGTNYNLRDRLKRDKKILVGQSTPSARSSSDSSVGAENRTPSPHTEDPSDANSGLDRCATVRIPFGGKSSS

SEQ ID NO: 279765 - protein, 69 aa, Glycine max
  Clone ID: PAT_MRT3847_9464C.1.pep
MSASLIFSGDNRLTVKTIFTCRDLDISVDYYTFTTHYRIVVPPYIRRYLDTLLIYILIFLIKKIMKYPK

SEQ ID NO: 279766 - protein, 53 aa, Glycine max
  Clone ID: PAT_MRT3847_94650C.1.pep
IQSSIHIAKCKFNNFSFRLYDNTKPSFKPKKKSPITHKTIVDKPLNPKHIKVT

SEQ ID NO: 279767 - protein, 173 aa, Glycine max
  Clone ID: PAT_MRT3847_94651C.1.pep
MEKSREEKLSQVWDCGSTLYDSYELNSFKRQLNTAIANSPSNRRTLSMSHLPERCLSSLQSQPQPPMSNNNKSFKISRTFQKLLRFVFKSSNKLRISSTRNTTSNNISTFQVAEKYANDRLYVVYDKSEPVLSTIPELPEFEVGVLSPDITSFVRKSSSERFMATTAIGISCA

SEQ ID NO: 279768 - protein, 138 aa, Glycine max
  Clone ID: PAT_MRT3847_94652C.1.pep
MSDIRKWFMKTHDKGNNAASSKPSSDKPQSEKTVAGGQESSGRRITSKYFNSNKQKGKDEKEKQELPAKRKNAKDSEEIHEDDGDDSVLPTNKKKLADTTPTKKLKSGSGRGIPKKSAVLEESDEDDDKDAVSAAKSV

SEQ ID NO: 279769 - protein, 157 aa, Glycine max
  Clone ID: PAT_MRT3847_94653C.1.pep
MAGTSLSHVIQSTVLELPRTTRHVRISAKSHRVSATSDQRPAGPCCIYVGPLETANKENLEALYCQARDAYYSGQPLIVDDMFDRVELRLRWFGSKSVVKYPRCSIRRQSTFADAEEDLSMVFALASTWAMFLAFGSLACVGPVSYTVGMAYQNAFD

SEQ ID NO: 279770 - protein, 33 aa, Glycine max
  Clone ID: PAT_MRT3847_94654C.1.pep
WIEICLSGIRQTNFKSVRQIESRSYIFTLGTLF

SEQ ID NO: 279771 - protein, 63 aa, Glycine max
  Clone ID: PAT_MRT3847_94655C.1.pep
PPTLAHWLGPPIMSFAPPPPPFSPPSPVPFLLPFPPHYPPYLSPPPRPPPSAPLSRSAHHRRQ

SEQ ID NO: 279772 - protein, 76 aa, Glycine max
  Clone ID: PAT_MRT3847_94656C.1.pep
QKHVTVSLYFSILCQFDLSVMCFAYCFEFLSFMVELPISSLVCVWFSLYPVSWIVESEWKVDRVEDPFVGRNSNFI

SEQ ID NO: 279773 - protein, 144 aa, Glycine max
  Clone ID: PAT_MRT3847_94657C.1.pep
MASIRAFFTAIAFVAQSFQNYMIQSLHKLYKHYGYAAEVKDNEEKESDYCSVCLSQICKGEKAKSLPVCNHRYHVDCIGAWLKNHTTCPLCRNNITDHITQKHKQVKSLGESLFNLIQSFSDLLVAILYMMLPSTITESFPLVH

SEQ ID NO: 279774 - protein, 128 aa, Glycine max
  unsure (1)..(128): unsure at all Xaa locations
  Clone ID: PAT_MRT3847_94658C.1.pep
DEMTLIPGTSVDEAYNKLIVELEKRVPTLVGIECAKDEKLTRSKIFDQPKTRWFTILPMEYNLGGRQKYLNXERFIMKNRDKLSCQVGINPYSMEWTGWANRSLSQGNDRLRGENARFDGLITKQVMN

SEQ ID NO: 279775 - protein, 52 aa, Glycine max
  unsure (1)..(52): unsure at all Xaa locations
  Clone ID: PAT_MRT3847_94659C.1.pep
IXKXXXXXXXHSXGXXLVVXXYXPFSXVSGLSSXAXIHXFPSXNNIXXXAHI

SEQ ID NO: 279776 - protein, 264 aa, Glycine max
  unsure (1)..(264): unsure at all Xaa locations
  Clone ID: PAT_MRT3847_9465C.1.pep
GDLRIHCERKPQKPMVVYRRMGELTLPQGTSQSVKRMPISIGGGAGAKNAILMNMPNAVLSMRRYFVGDLVFEVXKMTSTYIKCTPSVFIAFGNXADDTINFEAFPHKLVQFGEIQEKVVLKFSQEEFLTAWSTQVRPTTTLLADGCTYLHAMVHDSTVFTIPRDFXVIGVKXTTINNMCAYGLNPGISGSXLLGTIPKAIAHKTVLNQMATVRTPLNFDPNKQSFCQFYIDLLGGRILSDKTGDWITFIQNSSISYLMRVAAW

SEQ ID NO: 279777 - protein, 62 aa, Glycine max
  Clone ID: PAT_MRT3847_94660C.1.pep
PKIKITFLSIFLLQTNDLQLLAFNNPFITTYYMTYMFKYHTLHSQFKHFNLNPNDSNTLLFH

SEQ ID NO: 279778 - protein, 110 aa, Glycine max
  unsure (1)..(110): unsure at all Xaa locations
  Clone ID: PAT_MRT3847_94661C.1.pep
QPLPFSITTLIWIEVLIIDYIEFHMNPDLNPKKKLYPNNTYFYPLSLSSYPQNKSTLQLTEIKHTHLSMVGFLNFTLQSTTTDKGPLNNXTTHLSDPLHTTIINTFSSSS

SEQ ID NO: 279779 - protein, 149 aa, Glycine max
  Clone ID: PAT_MRT3847_94662C.1.pep
MRKLCPNFDNEDGLDTVLEVPIPEEMLSGMGSNGSNRWKNMRTLMNAQFVDKSSGLSTPSNNEFMVLLKLVGAPLIPLQVPSDHNLTRPLKDCSIRDSSAKYIVQQYVAATGGVAALNSLESMYAMGQVRICGSEVRRQGDGYEESVQS

SEQ ID NO: 279780 - protein, 74 aa, Glycine max
  Clone ID: PAT_MRT3847_94663C.1.pep
NGAVAVAPQIEVLGDHYGAVAVNQRLAVETEGATFTCFRIRVSYPTLVILSLSLRRKLSCCLNNLWHRHGIARA

SEQ ID NO: 279781 - protein, 186 aa, Glycine max
  unsure (1)..(186): unsure at all Xaa locations
  Clone ID: PAT_MRT3847_94664C.1.pep
VIQWEYEIXDVVPMEASHFLLGRPXXYDRYVVHNDVTNKFPFVHKGKKXTLTPLSPSEVCEDHIKMRVKREQERKEEKNTIDEQRKHERREKKEKSGDKKKSEAVKKDENQEERKIQSLFMREREVKRVMLARQPMYLVMFHDYGLSSVASSLPKVXEELLKEFGDVFPKDTPHGLPPLREIEPSC

SEQ ID NO: 279782 - protein, 54 aa, Glycine max
  Clone ID: PAT_MRT3847_94665C.1.pep
TAAQLIHDGRDVSSDIKSRNSDMSWSHQPQNTHAQWEHNLDYLSETRDLTKWQS

SEQ ID NO: 279783 - protein, 87 aa, Glycine max
  Clone ID: PAT_MRT3847_94666C.1.pep
NRTQNQWNLDLKTISITSYSTVYGTIRERKRTLCAGHRLRESFPFPFLVYLLNTLLFDIGLGVRFKLLLFLFQFSVQLQVQAGEMLD

SEQ ID NO: 279784 - protein, 283 aa, Glycine max
  Clone ID: PAT_MRT3847_94667C.1.pep
MGLLEENPNHSKTILIREVWASNLESEFQLIRQVIDDYPFISMDTEFPGVVFRPHTVDPTKPYLPPSVHYRFLKSNVDALNLIQIGLTLSDSNGNLPHLGTANRFIWEFNFRDFDVERDAHAPDSIDLLRRQGIDFRRNAAEGVDSYLFAELVMSSGLVCNDSVSWVTFHSAYDFGYLVKILTRRSLPSGLEEFLNMLRAFFGNNVYDIKHMMRFCDTLHGGLDRLARTLNVDRAVGKCHQAGSDSLLTWHAFQKMRDIYFVTDGPQKHAGVLFGLELTCSTS

SEQ ID NO: 279785 - protein, 212 aa, Glycine max
  Clone ID: PAT_MRT3847_94668C.1.pep
MVSLKLQKRLAASVLKCGRGKVWLDPNEVNEISMANSRQNIRKLVKDGFIIRKPTKIHSRSRARRMKEAKRKGRHSGYGKRKGTREARLPTKILWMRRMRVLRRLLRKYRESKKIDKHMYHDMYMKVKGNVFKNKRVLMESIHKSKAEKAREKTLSDQFEAKRAKNKASRERKIARREERLAQGPGEKVSAAPSATAATASQPAQAPKKSKK

SEQ ID NO: 279786 - protein, 216 aa, Glycine max
  unsure (1)..(216): unsure at all Xaa locations
  Clone ID: PAT_MRT3847_9466C.1.pep
MSMSFYPNPCADAWSLEFLKRTGFHCDIIGVTEWTATPLQDVQVTIDWFISSHECVPSTYCVLNPQNPFVLNRWMGKLTFPHSIFRSVKRKPLSIGGGAGAKNAILMNMPNAXVLSMWIYSSGQXKQYVCKMTSPYIKCTVSFLIAFVNHAADTMNEEAVTHELTHVVXIQEKVVLKFSQEEFLTAWSTQVRPATTLVADGCSYLYAMVHDSSMST

SEQ ID NO: 279787 - protein, 400 aa, Glycine max
  Clone ID: PAT_MRT3847_94670C.1.pep
MKQKTPSSPTTARNASKMQGDKSLQSPPPPPPPRLRASSKAPKSPPEIVNRESISSTRAKSVPPDLKNVSRAKRGVVVNKPKLNEEAKVVVVARPRRRVGDFDLQKNEDDDPDGKKKKELQEKLEVSENLIKSLQSEVLALREELDRVKSLNVELESRNTKLTQNLAAAEAKISTVDIGNNGKKGPIGEHQSPKFKDIQKLIAEKLERSRVKKEGTPEIIFAKASISAPTPSYAIPETTSIGRKSPPNTCLQPPPPVTSVGRKSPSNTCLQPPPPPPIPTRPLARLANSQKSPAIVELFHSLKNKDWKIDSKGSVNHQRPVVISAHSSIVGEIQNRSAHLLAIRADIETKGEFINDLIRKVVDAAFTDIVEVLKCVDWLDVKLSSLADERAVLKPFKWPE

SEQ ID NO: 279788 - protein, 143 aa, Glycine max
  Clone ID: PAT_MRT3847_94671C.1.pep
TNAYSSFLCFHLVYSPSPQAKLRCISSASSQAHCRRDLCGMDPSQLTMIHCTQSGNQISGSSLYSVGDRFMHNAKMIYFDEVSKVKKQCFSTTAESNPLLSGSITPAKHNLVLSNTQLDDIPFEDLSSPRVRSIGVTKHIKIE

SEQ ID NO: 279789 - protein, 95 aa, Glycine max
  unsure (1)..(95): unsure at all Xaa locations
  Clone ID: PAT_MRT3847_94672C.1.pep
MIHVCSLAALPETVRLTGASHXLTVMANVEQVARPVSVLPANHLKVSMDDITEXEDGFVAPSEAHIDQVLNFVRRWERSAPLVVHCYAGISRSTA

SEQ ID NO: 279790 - protein, 42 aa, Glycine max
  Clone ID: PAT_MRT3847_94673C.1.pep
MAKTTHIAIVSSPGFGHLVPIIEFSKRLIKNHPNFHVTGIIP

SEQ ID NO: 279791 - protein, 43 aa, Glycine max
  Clone ID: PAT_MRT3847_94674C.1.pep
TARRSRQKGIPRGHECVYDIGYRSICSPRLEMPSMGCAHYVLE

SEQ ID NO: 279792 - protein, 161 aa, Glycine max
  unsure (1)..(161): unsure at all Xaa locations
  Clone ID: PAT_MRT3847_94675C.1.pep
MPNWELRNCCDHDQKVFIACVAAFTVVILVLWRTFLLTPFKLITVFLHEASHAIACWLTCGKXLGSSFWGMALILASTNLLTAKIAAGCFIAALIVVLFLAKNVRLVMDADVLYQIYQSYFCPDFSPFSCLATHFCSKSGPSEDSVLVSEMIFISNKMERY

SEQ ID NO: 279793 - protein, 46 aa, Glycine max
  Clone ID: PAT_MRT3847_94676C.1.pep
TLFNKLNLNLTIFLHHDYMPPFVLLNLNIRETKPLPLSIRIKWPWS

SEQ ID NO: 279794 - protein, 234 aa, Glycine max
  Clone ID: PAT_MRT3847_94677C.1.pep
MPNWELRNCCDHDQKIFIACVAAFTVVILVLWRTFLLTPFKLITVFLHEASHAIACWLTCGKVEGIQVHANEGGVTQTRGGIYWVILPAGYLGSSFWGMVLILASTNLLTAKIAAGCFIAALIVVLFLAKNWTLRGLCIGFIVFIAVIWLLQEKTTVHVLRYVILFIGVMNSLFSVYDIYDDLISRRVHSSDAEKFAEVCPCPCNGFGWGVIWGMISFAFLCASLYLGLVILSG

SEQ ID NO: 279795 - protein, 72 aa, Glycine max
  Clone ID: PAT_MRT3847_94678C.1.pep
WGKWKKYFWQGGPKRIRDTPPKFRHSFYGLTIKRNRPLFFSGGARKDFKLGVFGGIWKNQLREEFFLPPAFI

SEQ ID NO: 279796 - protein, 90 aa, Glycine max
  unsure (1)..(90): unsure at all Xaa locations
  Clone ID: PAT_MRT3847_94679C.1.pep
CTDSHSSKPSRKIRGIMKPRIVSLKIEHLVXLPRWFXTQVLKRIWSYINDNNIDDPTHKMTINCDEKLKNVFAGKDQDDMLQIARSIIPY

SEQ ID NO: 279797 - protein, 152 aa, Glycine max
  unsure (1)..(152): unsure at all Xaa locations
  Clone ID: PAT_MRT3847_9467C.1.pep
EVQVVHNFVGINTLMYYSLTIVQFAGIASNSTGLALSLITSGLNALGTILSMVFIDRYGRRRLILVSMVGIIVFLVVXVLYFYLAVQNAPWNSNHDTLAFGRNSTCEAYPTALILSSWNFMQCLQEDCAFYANSDNQVYNKLTSSNLLLSFP

SEQ ID NO: 279798 - protein, 49 aa, Glycine max
  Clone ID: PAT_MRT3847_94680C.1.pep
FPNPININRTKIHQILRQGTQNEDLLGGLTFFKKMRQNNEPNLIFKTNY

SEQ ID NO: 279799 - protein, 407 aa, Glycine max
  Clone ID: PAT_MRT3847_94681C.1.pep
MLGIRLEKTLGLASLMSKAGMHLPAKKNPKLPWFDLILADIGDHQSLEQNLSTFSGHISRICKILEVASTQSLVLIDEIGGGTDPSEGVALSASILQYLKDRVNLAVVTTHYADLSSMKEKDTRFDNAAMEFSLETLQPTYRILWGCTGDSNALSIAQSIGFDRNIIDRAQKWVEKFKPEQKQERRGMLYQSLQEERNQLKAQAEKAASVHAEIMSVYNEIQGEAEDLDQREMELMAKETQQVQHELEHAKSQIETVIQKFEKQLRISGRDQLNYLIRESESAIASIVKAHTPADSFPINEADRALYTPQIGEQVHVKGLGGKLATVVESPGDDGTIMVQYGKVKVRVKKSNIIAIPSSRKNAVTSSSSTHQGRQVRIKMFRYLLSCKCSIDIITLKEENKVIYFSI

SEQ ID NO: 279800 - protein, 55 aa, Glycine max
  Clone ID: PAT_MRT3847_94682C.1.pep
GTKLNSGSSSSIDRRSPIFFIFFFLFFFFIFFCIKIQFYTHSLTFSTKFYYKLVK

SEQ ID NO: 279801 - protein, 206 aa, Glycine max
  unsure (1)..(206): unsure at all Xaa locations
  Clone ID: PAT_MRT3847_94683C.1.pep
MSSSNQLNQSSRFLANKPRNEVNVQGYTFRIDGNTTFVMNYGRWSEKRKRLISEIRSALNVHNDQVLDDKLLFLIDTVMKHYFELFGLQXASAICVFSVVSAIWCTTAERNLLWIGGFCPSQLLXEDALAQGMEKLQQNLDKATAAGDKALKLTCVSQQMSFLKQANHVRQQFLYQLSRLLTICQYAEFLLAFGECLYNSQPWSSL

SEQ ID NO: 279802 - protein, 84 aa, Glycine max
  unsure (1)..(84): unsure at all Xaa locations
  Clone ID: PAT_MRT3847_94684C.1.pep
GCYAGDXQGLAAAGQCCKQLEDLNLRFCEGFTDTGLVKLALGVGKSLKSLGVAACAKITDISMEAVGSHWRSLETLSFDSECIH

SEQ ID NO: 279803 - protein, 155 aa, Glycine max
  Clone ID: PAT_MRT3847_94685C.1.pep
MTINLRDLALSTLAVPALAISALARTTPALAAAADEEAVAKKVEAFRLAQIAADPKALGALCWDDLSYSHSSGKVEDKATFITNATDGKSKFLSIEYKDPTIKVVGPAAIVRFHWVAEQEMAADGKKVPTNLHILMNWQKQGDDWKLLSRAATKL

SEQ ID NO: 279804 - protein, 183 aa, Glycine max
  Clone ID: PAT_MRT3847_94686C.1.pep
FVVSNENASVAELAATLQADLSQLQAAASFVCRLGWATKVIDPASILQDTNIPGSPKSAVNDEYASIASHGFDNMLIDNDNNQSDAYGPHSCHTRVAFIVDANITSYLMMGSVSPGLKSHAVTLYEAGKLGHASITDLCKDLSTLEGAKFEGELQEFANHAFSLRCVLECLQSGGVASDAKVG

SEQ ID NO: 279805 - protein, 109 aa, Glycine max
  unsure (1)..(109): unsure at all Xaa locations
  Clone ID: PAT_MRT3847_94688C.1.pep
SKKWFVEVVGLESLNNGHVATNALPSRSTLTALPLSFPKPLLSFISHYPHQTPTAIQCRSCIIRSPDSVATPSLRFRPPRASXNSPFPSRFLRASPSPPCCFSASAFAC

SEQ ID NO: 279806 - protein, 103 aa, Glycine max
  Clone ID: PAT_MRT3847_94689C.1.pep
ASTLCTPLSHSLSDTFANVYRTITVQPRPQGCLHAIRHALASLFLSAHSWTYPQKPQPLHLLSYCDEGTHDLPPTDCKPEKVAVVSSMSPVWHRGTLYLMGDN

SEQ ID NO: 279807 - protein, 58 aa, Glycine max
  unsure (1)..(58): unsure at all Xaa locations
  Clone ID: PAT_MRT3847_9468C.1.pep
YFSGDNRLTEKTIFTCRDLDISADYYTLATQFRKFLPAYNXWLPCTLVVYNLPSFLTC

SEQ ID NO: 279808 - protein, 195 aa, Glycine max
  Clone ID: PAT_MRT3847_94690C.1.pep
RKKHHSARASHHMHKHKAKHSSSKDKYSSRGTKHDCSTSDYEHHRSRHHRHKYDGSSDDEQHHRSRHRRHKYDGSSDEKHHPSKRRHRDDSLSDHEHRHSHHSNKDYSSSDDEHRHRSRNVRLKSRSRAERETELEEGEIILKSEKSVVSGEVGRASREASEGLSNARVPSQSPEITDVSDELRAKIRAMLMANL

SEQ ID NO: 279809 - protein, 94 aa, Glycine max
  unsure (1)..(94): unsure at all Xaa locations
  Clone ID: PAT_MRT3847_94691C.1.pep
RTTTNARRETERHAHRQSRRARGHGRRRSRRRRADGXRGHTDRKPHAXGDGXSADAQAKNRXEEQSQXDTDPDATNXGGXDGHGGPEXXRXGNK

SEQ ID NO: 279810 - protein, 105 aa, Glycine max
  Clone ID: PAT_MRT3847_94692C.1.pep
MMDTTAKRDAVNAPIAATTMEVLYPASAVVAAQENSDVKTLVKHMRGKTYCDKGWECKGWSIHCCAVTITDYYQTYQLENHFSKRNSPAAHGRGFCDYHSLIAGV

SEQ ID NO: 279811 - protein, 43 aa, Glycine max
  Clone ID: PAT_MRT3847_94693C.1.pep
AAAIIRAIMLSSAISAASAASLHITDWVIGTPQGTWVSIRVYS

SEQ ID NO: 279812 - protein, 70 aa, Glycine max
  Clone ID: PAT_MRT3847_94694C.1.pep
AGVFPTWPSYGRPKSRIPVDEKRWFNQNRRIQKETIAPEDFPNLVGEGFQVKRVSSDTFLRGVPGLISRD

SEQ ID NO: 279813 - protein, 84 aa, Glycine max
  Clone ID: PAT_MRT3847_94695C.1.pep
TMTANLLWNGILPRLQRCMDLYFINSTGTTTEATVPYVPSTWKITDHCRRGATSLGLRNTKPRANLFPQKLPVRNTTGISGLKL

SEQ ID NO: 279814 - protein, 354 aa, Glycine max
  Clone ID: PAT_MRT3847_94696C.1.pep
MGDQVEGTVQNVLEQETLKWVFVGGKGGVGKTTCSSILSILLATVRSSVLIISTDPAHNLSDAFQQRFTKTPTLVNGFSNLYAMEVDPTVEHEDMGGADGMDTLFSELAGAIPGIDEAMSFAEMLKLVQTMDYSVIVFDTAPTGHTLRLLQFPSVLEKGLAKVMSLKNKFGGLFNQMTRMFGMGDDFGDDQILGRLEGMKDVIEQVNKQFKDPDMTTFVCVCIPEFLSLYETERLVQELTKFEIDTHNIIINQVIFDDEDVESKLLKARMKMQQKYLDQFYMLYDDFNITKLPLLPEEVTGIEALKAFSRHFTSPYQGLCGKGDPVERLERKVSALQRQLHEAEEELERLKRGN

SEQ ID NO: 279815 - protein, 58 aa, Glycine max
  Clone ID: PAT_MRT3847_94697C.1.pep
IRTLSSETTTDLVSETEDAGGGKELSKSFFWPLPSMLMSLAPLHRRSTSEETAGAPAP

SEQ ID NO: 279816 - protein, 332 aa, Glycine max
  unsure (1)..(332): unsure at all Xaa locations
  Clone ID: PAT_MRT3847_94698C.1.pep
MELLGVNFEKSSLPGQNHIPFHLKCIAGQFKDRPFYIHKSFDPQLKMIQTLVAVFSNLYAMEVDPTVEHEDMGGADGMDSLFSELAGAIPGIDEAMSFAEMLKLVQTMDYSVIVFDTAPTGHTLRLLQFPSVLEKGLAKVMSLKNKFGGLFNQMTRXMLALGDDFGDDQILGRLEGMKDVIEQVNKQFKDPDMTTFVCVCIPEFLSLYETERLVQELTKFEIDTHNIIINQVIFDDEDVESKLLKARMKMQQKYLDQFYMLYDDFNITKLPLLPEEVTGVEALKAFSRHFTSPYQALCSKGDPVERLESKVSALQRQLHEAEEELERLKSGN

SEQ ID NO: 279817 - protein, 187 aa, Glycine max
  Clone ID: PAT_MRT3847_94699C.1.pep
MIVSMMGGRCYSSYRSNAVAAVMRDRKWKSNSKSEEADVVVIGSGIGGLCCGALLARYEEDVLVLESHDQPGGAAHSFDIKGYNFDSGPSLFSGLQSRGPQANPLAQVLDALGESLPCATYDSWMVHIPEGQFLSRIGPTEFFKVLQTFIGLFLVSLSLSLSLSLITVSTARTAGRLPRIPGYRARI

SEQ ID NO: 279818 - protein, 187 aa, Glycine max
  unsure (1)..(187): unsure at all Xaa locations
  Clone ID: PAT_MRT3847_9469C.1.pep
FPGRPTRPRFGHDTLVDAMLKDGLWDVYNDCAMGMCAELCADNHALTREDQDAFAIQSNERGIAARDSGAFAWEIIPVQVPVGRGKPPTLIERDESLDKFDPVKLKKLRPSFKENGGTVTAGNASSISDGAAALVLVSGQKAQELGLQVLARIKGYADAAQASELFTNHSALXIPKAIANAGLESSH

SEQ ID NO: 279819 - protein, 55 aa, Glycine max
  unsure (1)..(55): unsure at all Xaa locations
  Clone ID: PAT_MRT3847_946C.1.pep
YCLGEYQCRVLKAETALREKEEENDVLHHRLRQYDSXWSEYESKMKSMEEVWQKQ

SEQ ID NO: 279820 - protein, 77 aa, Glycine max
  unsure (1)..(77): unsure at all Xaa locations
  Clone ID: PAT_MRT3847_94700C.1.pep
DQGFPLTEVSVYIPHRKIEGGGGGXGNXTIRLHIKPQLMHPFPPXCPFWFLCFGRLAGHICFIQTKTQKGGGPNTGD

SEQ ID NO: 279821 - protein, 62 aa, Glycine max
  Clone ID: PAT_MRT3847_94701C.1.pep
DATIHIVYLSPYVIVSFMKVVQSYYLNSFHIVFDVLASLSFLFFLSILYCTKVSFPYHILTR

SEQ ID NO: 279822 - protein, 182 aa, Glycine max
  Clone ID: PAT_MRT3847_94702C.1.pep
MEVQTHTLSTFDIHQPQFRSSEYPNPTFPLSPHDPPLQTPTHAPPEPHTLGRACPQTTAALKVQKVYRSYRTRRRLADSAVVAEELWWQVIDFARLNHSTISFFNLPESAASRWSRVKLNASKVGKGLYLDAKAQKLAFQHWIEAIDPRHRYGHNLHYYYEEWCKTDSGQPFFYWLDLGNGK

SEQ ID NO: 279823 - protein, 101 aa, Glycine max
  Clone ID: PAT_MRT3847_94703C.1.pep
TSQVLEAQLSTIESLIRPLTYHMGVTKPHVLMLLIIMVVSIAEKPSVIEGRALSLISGQGYSKIFATLGLVCKCCDGVGGACTSTWTESCNNLQCLPWKSH

SEQ ID NO: 279824 - protein, 109 aa, Glycine max
  Clone ID: PAT_MRT3847_94704C.1.pep
LDQTAMYLLFIVGFHHIKFFLHPWFIRHIQISFFQPSQESFCTHIPGCNEEYDNMIMRNPLEATQKNKEHYLCMGMRGTERDWNPRVRIDDRIGRDGSRWAGTLQFRSG

SEQ ID NO: 279825 - protein, 78 aa, Glycine max
  Clone ID: PAT_MRT3847_94705C.1.pep
LSCFPATKLPAQRMCTFAETLDLLMQPGSKHVDLNIDVKLDIDPELLYPFMRWEIVSFPGWYTYLVPRHISWPLARLA

SEQ ID NO: 279826 - protein, 85 aa, Glycine max
  unsure (1)..(85): unsure at all Xaa locations
  Clone ID: PAT_MRT3847_94706C.1.pep
GPQFTFLGAGLYNGEWENPVVSPIXSLVEHIPFSTGGNIEKGPTESAFPNMCTLNGEWGTPSVGAYKARGVGGLRTVSLILCGAL

SEQ ID NO: 279827 - protein, 104 aa, Glycine max
  unsure (1)..(104): unsure at all Xaa locations
  Clone ID: PAT_MRT3847_94707C.1.pep
TPDLILLLIQWTRKRADDKRTCGQHNHCTHLELNLYLLHRSTLTTPTTXVLYQREQIEXCQMHKPIVTTLHYLLTPNIFKLLLLKRTYLHHKEINICSRGTNHC

SEQ ID NO: 279828 - protein, 93 aa, Glycine max
  Clone ID: PAT_MRT3847_94708C.1.pep
PLRSRIITGLVTPSPILRIPGPRFYAKASINPGARSARLMRALRLMRRMSRRPSYGLMSRPESLCALSRADRRVSPRRYYGNGNRNGFNNAYT

SEQ ID NO: 279829 - protein, 77 aa, Glycine max
  Clone ID: PAT_MRT3847_94709C.1.pep
LVVFLKKKNLSFYSLYNSFVLLLLLHVLLSLSFFSSFFFFFSALDLALTHHLAVFRHGVSLLLLLLLLLLLFLLSNH

SEQ ID NO: 279830 - protein, 242 aa, Glycine max
  unsure (1)..(242): unsure at all Xaa locations
  Clone ID: PAT_MRT3847_9470C.1.pep
MFASVIFSGDNRLTEKTIFTCRDLDILVVDYTLATQFRKCLPHYIRGHLYTLLIYILPSWLTAEMKYKRDLSKIYISGLFYDGRYKLWTKHEKNLALTEEEKMEVIRNKGIPADVLAKRAHEFEKHVAHESLKDQIPAVDKLYSTKVNKFVKFMNLIQSVVGDLKLLTDGKFVXGKHIPVSNISARENHCSLNTLXAHEENLSSYASDFRTAMVXKNIMPQASXMHVGAXKLIIDCFLSPDL

SEQ ID NO: 279831 - protein, 69 aa, Glycine max
  unsure (1)..(69): unsure at all Xaa locations
  Clone ID: PAT_MRT3847_94710C.1.pep
QGCQLGLPNXXVTVNPGIXTTARGVSDPSLCIFKLTYNSLGPKPIVIYWCWXPFVGSCGWLAIYHQYIX

SEQ ID NO: 279832 - protein, 113 aa, Glycine max
  unsure (1)..(113): unsure at all Xaa locations
  Clone ID: PAT_MRT3847_94711C.1.pep
MDDMVEYFREQLPGFAFTVYGWQQPYGFRXVKTPNDYRVVRQPKVFPVFWSSLAQSFTKRPMKGMLTGTVTNLNWPSVTHLQTIAVSTFLMLLWIKDELVDLVKVSLTVLHIV

SEQ ID NO: 279833 - protein, 63 aa, Glycine max
  Clone ID: PAT_MRT3847_94712C.1.pep
KGNYFFAKGNTNTSFELDAKMSRLAFNHSMLSIIKGSRVNMMSKTNYKLEYALSDQPWLDRLT

SEQ ID NO: 279834 - protein, 90 aa, Glycine max
  unsure (1)..(90): unsure at all Xaa locations
  Clone ID: PAT_MRT3847_94713C.1.pep
GGGGTWEKFVCYPFNVXKKNFKLRVFKENSKNGAGVEHWGNKKMLRAMERILHMEGWVGLNKGKLPLTVKIATSGAVTIVGDELPVNWVE

SEQ ID NO: 279835 - protein, 99 aa, Glycine max
  Clone ID: PAT_MRT3847_94714C.1.pep
PWGGFSRQNRIKGPKGCFFSFPWKEGGPGSSPKKGAKPLVINRGKPWASRGTPAGRKVMVPQLLGDLRFWWWIGKGATLDIYSNLCPPPTCFPKICFFR

SEQ ID NO: 279836 - protein, 60 aa, Glycine max
  Clone ID: PAT_MRT3847_94715C.1.pep
GKTKMFPLGLQKKLSQPNLFRMGFANNFNTCFKKSPTTPIIKSPFNLKPPLIKLGIYYNH

SEQ ID NO: 279837 - protein, 68 aa, Glycine max
  Clone ID: PAT_MRT3847_94716C.1.pep
NYGQMIHMFRRLFKLEREQKIPSIDAMAGLHKHGTFQGWFNTFIILQTQTCDFFFIDMPRNPKKVSFP

SEQ ID NO: 279838 - protein, 50 aa, Glycine max
  Clone ID: PAT_MRT3847_94717C.1.pep
SSLIKIKYNAFFVSSVYNAFFLYFFFPHIQFLLVSVFHLCFHNPPSFFGF

SEQ ID NO: 279839 - protein, 146 aa, Glycine max
  Clone ID: PAT_MRT3847_94718C.1.pep
RTTLYQERGKCARLCVEVDLTQPLLALFELNNMYCKIEYEELHFLFLTCGRLGHYMEGCPDKDKPNTWNGEKPPQKDAIENIGDNEQVPNEGPWAGVKKLVDRGKERKKNKALRTCSLKPQERFVVLSHLKIILQKMRMRQLDPHI

SEQ ID NO: 279840 - protein, 111 aa, Glycine max
  unsure (1)..(111): unsure at all Xaa locations
  Clone ID: PAT_MRT3847_94719C.1.pep
MDKMELAETPIPLLSLNHVSFACKSVSESVKFYXDVLGYKLIKMSSSFKFERAXLFNYVICIHLLESEKXLRKIREINPNDNHISXQCLDMKVMMHKLDAMNIEYVTAVAE

SEQ ID NO: 279841 - protein, 108 aa, Glycine max
  Clone ID: PAT_MRT3847_9471C.1.pep
IKSGFPPCGVWSPKKWGFFGSQEFFLCLLGGEWFFLNSKKIGPLLIWNRGFFSLFKSPRSPSPQIFVPRAWATCAPWAFGGFLYQGPNFKGAFFGLFFFYIRIGIFVP

SEQ ID NO: 279842 - protein, 166 aa, Glycine max
  Clone ID: PAT_MRT3847_94720C.1.pep
TTQPIPDSSAPTTSGFGMGIGISIGILLLITTITLTSYFCTRSQVPTPPRRRTTSNSNPQFLEPHHTIVDVGLDEATIMNYPKMLYSEAKLRKFDSTSTSCSICLGDYKGSDFLRVLPDCDHVFHLKCIDPWLRLHPTCPLCRTSPIPTPLSTPLAEVVPLATRRD

SEQ ID NO: 279843 - protein, 171 aa, Glycine max
  unsure (1)..(171): unsure at all Xaa locations
  Clone ID: PAT_MRT3847_94721C.1.pep
LGAYLIGNMTALIVKGSKTEKFRDKMTDLMKYMNRNRLGRDIREQIKGHVRFXYESSYTEASVIQDIPISIRAKISQTLYLPYIEKVSLFKGCSSEFINQIVIRLHEEFFLPGEVIMEQGNVVDQLYFVCHGVLEEVGIAEDGTEETVSLLQPNSSFGEISILCNIPQPYT

SEQ ID NO: 279844 - protein, 112 aa, Glycine max
  Clone ID: PAT_MRT3847_94722C.1.pep
SSRARHVETRENVAIKILDKEKLLKHKMIAQIKREISTMKLIRHPNVIRMYEVMASKTKIYIVLEFVTGGELFDKIARSGRLKEDEARKYFQQLICAVDYCHSKDVSNLTIY

SEQ ID NO: 279845 - protein, 59 aa, Glycine max
  unsure (1)..(59): unsure at all Xaa locations
  Clone ID: PAT_MRT3847_94723C.1.pep
TSSRHLKHNELIIFMKPNIIFMNHNKYCQTLLKPSQRAQKRSNQHNATXNKLLDLLASL

SEQ ID NO: 279846 - protein, 82 aa, Glycine max
  Clone ID: PAT_MRT3847_94724C.1.pep
MASLSSLVLLLAALILSPQVLANYENPPVHKPPTAKPPVYTPPGEKPPVYKPTDENTSKYKPTAEKPPDYMPTLEKRTVHKP

SEQ ID NO: 279847 - protein, 314 aa, Glycine max
  unsure (1)..(314): unsure at all Xaa locations
  Clone ID: PAT_MRT3847_94725C.1.pep
MATLIAPSNHSPQEDAEALRKAFEGWGTDEKTVIVILGHRTVYQRQQIRRVYEEIFQEDLVKRLESEIKGDFEKXAVYRWILEPADRDAVLANVAIKNGKNYNVIVEIATILSPEELLAVRRAYLNRYKHSLEEDVAAHTSGHLRQLLVGLVTSYRYVGDEINPKLAQTEAEILHDAVKEKKGSYEETIRVLTTRSRTQLVATFNCYREIHGTSISKKLVDEGSDEFQRALYTAIRGIKDPIKYYEKVVRNAIKKVGTDEDALTRVVVSRAEKDLKIISEVYYKRNSVLLEHAIAKETSGDYKKFLLTLLGKED

SEQ ID NO: 279848 - protein, 107 aa, Glycine max
  unsure (1)..(107): unsure at all Xaa locations
  Clone ID: PAT_MRT3847_94726C.1.pep
MATLIAPSNHSPQEDAEALRKAFEGWGTDENTVIVILGHRTVYQRQQIRRVYEEIYQEDLVKRLESEIKGDFEKAVYRWILEPADRDAVLAXGGXXRGGNYEGVGGG

SEQ ID NO: 279849 - protein, 313 aa, Glycine max
  Clone ID: PAT_MRT3847_94727C.1.pep
MATLIAPSNHSPQEDAEALRKAFEGWGTDENTVIVILGHRTVYQRQQIRRVYEEIYQEDLVKRLESEIKGDFEKAVYRWILEPADRDAVLANVAIKSGKNYNVIVEIATILSPEELLAVRRAYLNRYKHSLEEDVAAHTSGHLRQLLVGLVTAFRHVGDEINPKLAQSEAEILHDAVKEKKGSYEETIRVLTTRSRTQLVATFNRYREIHGTSISKKLVDEGSDEFQRALYTAIRAINDPIKYYEKVVRNAIKKVGTDEDALTRVVVSRAEKDLKIISEVYYKRNSVLLEHAIAKEISGDYKKFLLTLLGKED

SEQ ID NO: 279850 - protein, 127 aa, Glycine max
  Clone ID: PAT_MRT3847_94728C.1.pep
LIHHHYLNYISRHILHIMPSPFHQKYSSQSHKVFGDNTVPAMPEAPKDDAERRGSDASVTRSSYDGRRRSSAAQRFGNLEALKRPQDEQSAARRASLHDSYGKVGFIGSMWNNFTRGPAPKMQSPPK

SEQ ID NO: 279851 - protein, 79 aa, Glycine max
  Clone ID: PAT_MRT3847_94729C.1.pep
TVNCLPCLLASYGTHNTVIPLLRESSQMTQGPPTQGIRTFKMSQRGWFYLWPERSIVLKDTGEASPGKINVPSINLGFL

SEQ ID NO: 279852 - protein, 201 aa, Glycine max
  Clone ID: PAT_MRT3847_9472C.1.pep
MEITSSHNSGSMMWFFKDKGFDDNSAQGMFRKCRRLEGVHQERASENWDYLRSIGIEERKLPSIVSKCPKILALDLYEKIVPTVECLRTLGTKPNEVASAIAKFPHILSNSVEEKLCPLLAFFQTLGIPEKQIGKMILLNPRLVSYSIATKLTEIVNFLANLGLNKDGMIGKVIVRDPYIMGYSVDKRLRPTSEFLKSIGL

SEQ ID NO: 279853 - protein, 80 aa, Glycine max
  Clone ID: PAT_MRT3847_94730C.1.pep
MRRNSPAYYSPPRRGYGGGGRGGGGGGGGGGSGRRGFGGGRRRDSNGSLLVRNIPLDCRPEELRVPFERFGPVRDVYIPK

SEQ ID NO: 279854 - protein, 186 aa, Glycine max
  Clone ID: PAT_MRT3847_94731C.1.pep
MRRNSPAYYSPPRRGYGGGGRGGGSGRRGFGGGRRRDSYGSLLVRNIPLDCRPEELRVPFERFGPVRDVYIPKDYYSGEPRGFAFVQFVDPYDASEAQYHMNRQIFAGREISVVVAEETRKRPEEMRHRTSRFRGPASYGGRRSSHYGRSRSRSITRSRSPPYHSGSRNRYRSRQDSLKCLHVIVH

SEQ ID NO: 279855 - protein, 82 aa, Glycine max
  unsure (1)..(82): unsure at all Xaa locations
  Clone ID: PAT_MRT3847_94732C.1.pep
GDAPTPDPSPATFNGLRANPRSQLFSFERNPEFDNLFRLLLMEDSGVGKXCLLLRLADDSSIGGSIGTMGVDFKIRPVDQDG

SEQ ID NO: 279856 - protein, 74 aa, Glycine max
  Clone ID: PAT_MRT3847_94733C.1.pep
SCQILFHDVSGAFRSFARSLEYTLVDSSNNTSWIYFHNVENQPASSSFEQFHATPCMGYQIWSPSSIRPFPYAR

SEQ ID NO: 279857 - protein, 276 aa, Glycine max
  Clone ID: PAT_MRT3847_94734C.1.pep
MRRNSPAYYSPPRRGYGGGGRGGGGGGGGGGSGRRGFGGGRRRDSNGSLLVRNIPLDCRPEELRVPFERFGPVRDVYIPKDYYSGEPRGFAFVQFVDPYDASEAQYHMNRQIFAGREISVVVAEETRKRPEEMRHRTSRLRGPASYGGRRSSHYGRSRSRSITRSRSPPYHSGSRNRYRSRSYSPAPRRQSDYSVSPGRQAEHPRSPRGPPREKDGDQKRRSYSPAYGNGIEQNQSNGYAEKSMYKSDADRSQWKSSRSPPGSRSRSAELSPRRGR

SEQ ID NO: 279858 - protein, 167 aa, Glycine max
  Clone ID: PAT_MRT3847_94735C.1.pep
SISYPSNSYFFTDSRYDQVSLSFAPNYVYPIHTFPVIHQNQQITNFRLLEKLFCWGDMMSMEKEASSSTPTRKLSCTACFDAVYFCYSPVHQMQQYYRLGKFDNCSGKWKAMVDCLMLKTKPTSQVQEVLDTEEKSKFKSHIWTFRTPEEASYYWQELYGHLDEPEE

SEQ ID NO: 279859 - protein, 46 aa, Glycine max
  Clone ID: PAT_MRT3847_94736C.1.pep
GSSSNATYYETLNTKHRPPQMTGRRIIQNHPPADIATTPTTQLNNS

SEQ ID NO: 279860 - protein, 101 aa, Glycine max
  Clone ID: PAT_MRT3847_94737C.1.pep
GLSSALAFFPVGPGSLLLVRALFCRRCIIFQVATALLRGVLRRSCSPAWPRPYAAPSSRLMFPLPCSPAIQELLLICSWTHLSVLGVSRFASAKKKKVTAS

SEQ ID NO: 279861 - protein, 61 aa, Glycine max
  Clone ID: PAT_MRT3847_94738C.1.pep
EMILESFWTIFAHYFEATFHGCLLLTMEFLVELRHLNTIDGVLLRINKGLAGVITVWIIYV

SEQ ID NO: 279862 - protein, 167 aa, Glycine max
  Clone ID: PAT_MRT3847_94739C.1.pep
NFTPTKLNSTTLSISPSNDIIKSLSASEIELSEDYTCVISHGPNPKTTHIFGDCILETHSNAFKTHFKNEEKEHGVKPLGSNKLGSPKPYPSSDFLSFCHHCNKKLEEGKDIYIYGGEKAFCSLTCRAMEIMIDEELEKSNTNPPCESSPKPKLGELLFETGILTAT

SEQ ID NO: 279863 - protein, 63 aa, Glycine max
  Clone ID: PAT_MRT3847_9473C.1.pep
ERLSPSSWNHCGKVLHLRPAEAHVSDLRSKSYRCPCRRTCFTVALAYHHNVTIMNEEVVVVCF

SEQ ID NO: 279864 - protein, 80 aa, Glycine max
  Clone ID: PAT_MRT3847_94740C.1.pep
TRCLYLSNLPTKLPSLLPYFVVHFGVPFTFTFLFSFKAGFKAADGFHLYYICYDFGLDLLFFPITYSTIYQRFSAYWWEF

SEQ ID NO: 279865 - protein, 70 aa, Glycine max
  Clone ID: PAT_MRT3847_94741C.1.pep
ISILYTLMYIHIKGSLTINHILCPIAEYKPTKSSGCHDADILQAFYKSITDYFDVISNSLAPVSIDHHNY

SEQ ID NO: 279866 - protein, 89 aa, Glycine max
  unsure (1)..(89): unsure at all Xaa locations
  Clone ID: PAT_MRT3847_94742C.1.pep
LDLHYEKERQAMNVDKAHIHSFXLLKSQIEPGTTYMQNQDTSNMTSTLHNPGTIKSSNXRTEITEYSRANXTTRCNIPSIALPQYVIEK

SEQ ID NO: 279867 - protein, 98 aa, Glycine max
  Clone ID: PAT_MRT3847_94743C.1.pep
VVMEAFTNMLSWFRVFCPKGAGSPDGSDVSHRIVMTVLALPWHNHGCRGWAARGSTLWKIRASSSYPLREFAYVELRKKEEKKRWMKLLPRLSRAKGP

SEQ ID NO: 279868 - protein, 174 aa, Glycine max
  Clone ID: PAT_MRT3847_94744C.1.pep
KAIDTRVQMPNDNTDAVFDEAFDSFFIKTGAGKHLPPAVIEDLKPTAIDEVITGNYRQLFHPDHLINFKQDADNNFTHSHYTIVKHIVDLGLDRIRKLADNCTGVQGVLAVYAVGGRTVSGLASLLVERFSVDYGKKSNLGVTAYPSAQEYTSVAKPYNRDLSNHSLLEHNDVA

SEQ ID NO: 279869 - protein, 42 aa, Glycine max
  Clone ID: PAT_MRT3847_94745C.1.pep
VFVCERNDFVKAGGSESIQKCGSDNMFSLDLGNFGHRRGQLK

SEQ ID NO: 279870 - protein, 101 aa, Glycine max
  Clone ID: PAT_MRT3847_94746C.1.pep
MNPHVLRGKGGFITMPFIIANEAPAKRGRVGLMPNMVLFFIGDSRLRVLKTPQIMFFWFAAPKFAPVIGAFVAKAYLGRFPALGLGSISSFPLWVLIGLIP

SEQ ID NO: 279871 - protein, 46 aa, Glycine max
  unsure (1)..(46): unsure at all Xaa locations
  Clone ID: PAT_MRT3847_94747C.1.pep
FFFXLKTRIPHCKTQQFQLVIPTSQCLTYLSTSLLTPQRRCGEYFA

SEQ ID NO: 279872 - protein, 55 aa, Glycine max
  Clone ID: PAT_MRT3847_94748C.1.pep
LPFKMRVKGISGMRRAECIEILYGMVVNSRLVGHAILVLRFMDRSRREMLRRCRK

SEQ ID NO: 279873 - protein, 39 aa, Glycine max
  Clone ID: PAT_MRT3847_94749C.1.pep
PHIRPHIRNLKRLHHRAPNTCLCEGLNNAYHFTHCHYIL

SEQ ID NO: 279874 - protein, 286 aa, Glycine max
  Clone ID: PAT_MRT3847_9474C.1.pep
ISSHEDGHVQRYPYPPLWSSPTNHQHPQGWKFIFLNDVECQCELPESYEAYRKQQHRWHSGPMQLFRLCLPDIIRSKISIWKKFNMIFLFFLLRKLILPFYSFTLFCIILPMTMFVPEAELPALVVCYIPATMSILNILPAPKSFPFIVPYLLFENTMSVTKFNAMISGLFHLGSAYEWVVTKKSGRSSEGDLVSLIEKGPKHHQRGSSAPDLAEIKEEIQLQEKKVGSKKKHNRIYMKELALAFLLLTASARSLLSAQGIHFYFLLFQGISFLLVGLDLIGEQVD

SEQ ID NO: 279875 - protein, 40 aa, Glycine max
  Clone ID: PAT_MRT3847_94750C.1.pep
KRKIFHRSLSKFESIDVLILKSMITISFSLFFFFSFSICP

SEQ ID NO: 279876 - protein, 210 aa, Glycine max
  unsure (1)..(210): unsure at all Xaa locations
  Clone ID: PAT_MRT3847_94751C.1.pep
MGVCFSSGPTQHSSSLDRPHYSGSASTNCKNVGITKTTSSSTENRQFTVIASGSIDDEESIHYLLRRVYHRPLRLPLPPPDGQILKWPNLKVFDFEELKSATNNFSSDTLLGEGGFGRVYKGWLDGDTLAPTKAGSGMVVAIKWLNPQSTQGFDQWQTELNIMRKVLSXPNLVNXIGLTVGDEXMSTLLVYEFMPKRSLDNHLFKRNRNL

SEQ ID NO: 279877 - protein, 99 aa, Glycine max
  unsure (1)..(99): unsure at all Xaa locations
  Clone ID: PAT_MRT3847_94752C.1.pep
QTSGKGGLVLVVETKGKLPKVIKNKGKPPLLDRIPTKYGSYPGDPGLQPPQXQPQIGNSLKKKGPFLPETFVKTNKVGVFSRFVEKPTWQPFFFFPPVG

SEQ ID NO: 279878 - protein, 367 aa, Glycine max
  Clone ID: PAT_MRT3847_94753C.1.pep
MVVKKPRIVIIGAGMAGLTAANKLYTATASKDLFELCVVEGGTRIGGRINTSEFGGDRIEMGATWIHGIGGSPIHKIAQEIHSLHSDQPWECMDGNTDEAITIAEGGFHLHPSIVDPITKLFNTLMEYSQGKKNLTEATSKGAELESYHKLAALAAKLASASASAYNNNNLSVGSFLRQGLEAYQVSKEQEEVKGCGNWSRKLLEEAIFAMHENNQRTYTSADDLLTLDYGAESEYRMFPGEEITIAKGYLSIIESLASVLPPGFVQLGRKVTRIEWQLDDEKRKGAVENGCCSSRPVKLHFCDGSVMSADHVIVTVSLGVLKAAISDDDDDSGMFCPPLPPSKTEAISRLGFGVVNKLFMQLSPTH

SEQ ID NO: 279879 - protein, 114 aa, Glycine max
  Clone ID: PAT_MRT3847_94754C.1.pep
MSSMKFCRRCNNVLYPTEDKEEKLLLYACRNCNHEEIADSNVVYRNKIHHSVQRRTRELENVAADPTLPRTKSVRCSQCNHGEAVFFKAPVKGEEGMALIFVCCNPTCGYRWRD

SEQ ID NO: 279880 - protein, 60 aa, Glycine max
  Clone ID: PAT_MRT3847_94755C.1.pep
GEHTHQEGHGEDLHENSRNEQAKIGANSRSCILCTSSSRYDSSHSLSMRGSLSMKENFPG

SEQ ID NO: 279881 - protein, 52 aa, Glycine max
  Clone ID: PAT_MRT3847_94756C.1.pep
AGEQSTELKTDSIPRTSTRKRMDLNPVPNQTPKSNIDAHLENLKIHNLFQPL

SEQ ID NO: 279882 - protein, 52 aa, Glycine max
  Clone ID: PAT_MRT3847_94757C.1.pep
FFFFFFFFFFFFFFFYYLKGLIILVSFHVHHWEIKSLAFIIAVNGAFRIIKG

SEQ ID NO: 279883 - protein, 610 aa, Glycine max
  unsure (1)..(610): unsure at all Xaa locations
  Clone ID: PAT_MRT3847_94758C.1.pep
MLGALSNTQERITPTMRITLEPSSEPSPSRSQTPKEELQWVPLPKHPLFTAHGGATTAADSRNLLAWDGASRLYLWDSNNRCLHRLSLRLGDPDPSSVLAASPSKVLQADAVLDFDVRKISINRNRTAILLFGSETLSVMYLYGRASKKDVNLICRTITVGSQMYSTGGNDIRVLQALWYPYSDTHLGILSSDSVFRLFNFAVDPLQPEQEYYLQPVEPGRSRNASSLCPVDFSFGGDHLWDRFSVFILFXGAFYVLCPVVPFGXISKFVTVFSAYPQSLQMRRPVFAKAHAYALFDAPLVLQGPLRRVGQGGNEDSVGRSAECEGRAVSFLYNLVSKDSILVTAWSGGKLQIDALADEIQPVWSVGSPPRLRVDSHDQILGLAMICESIASSSLWKLDHNAWLGNSPPLLRLAIVDLALPQRAESGYIISLFIDTLMPERIYSLHDGRIDSIVLHFLPFTSQTNGKDDTMKTPSVHPVLNTCQSGFTSEPSLCGFVSLSDSFGYSWIVAITLSLECVVLEMKSWNLLLPVSIDMEKKTISSEGEPKERDIPTIISKELLRGTREVLVPQASPSLQSVAADSIEGRSTLHQYFKLFHETYVEYAHKVGLS

SEQ ID NO: 279884 - protein, 849 aa, Glycine max
  unsure (1)..(849): unsure at all Xaa locations
  Clone ID: PAT_MRT3847_94759C.1.pep
MRITLEPSSEPSPSPSRSQTPKEEVEWVPLPKHPLFTAHGGATTAAASRNLLAWDGASRLYFWDSNKRCLHRLSLRLGDPDPSSVLAASPSKVLQSDAVLDFDVRKISINRKGTAILLFGSETLSVMYLYGRASKYDVERLQQLRNLICVHKKPLSRAERKFKSELDHFRTITIGSQTYCTGGNDIRVLQALWHPYSDTHLGILSSDSVFRLFNLAVDPLQPEQEYYLQPVEPGRTRNASSLCPVDFSFGGDHLWDRFSVFILFXGAFYVLCPVVPXFGSLFKCESLVEIFNDAHTFGIISINSVAASNSKLAISWRRPVFAKAHAYALFDAPQVFQGTLLRVIKDGNEDSVGRRVECEDRAKSFLXNLVSKDSILVTAWSGGKLQIDALADEIQPVWSVGSPPRLRVDSHDQILGLAMICESIASSSLWKLDHNAWLGNSPPLLRLAIVDLALPQRAESGYIISLFIDTLMPERIYSLHDGRIDSIVLHFLPFTSQTNGKDDTMKTPSVHPVLNTCQSGFTSEPSLCGFVSLSDSFGGSWIVAITLSLECVVLEMKSWNLLLPVSIDMEKKTISSEGEPKERDIPTIISKELLRGTREVLVPQASPSLQSVAADSIEGRSTLHQYFKLFHETYVEYAHKVYLELKHHAPQLKKIINDQHSRLGDAQKKLLKIEEQEAILPKRIDRAIQXNSLEERLQHLRNLPYAHKKPLSRAERHLXALSFPVPDTPFPIPLHLLPFLSTENFFQKHLITPFFPDHFKEVELDALHSSVDALSARLRRHLQASKANHQQQKTPGKKSCAGDDQMSMLKSSLEKLSLVNTENSKKVKLVESTLRNKERSSRESSLPIL

SEQ ID NO: 279885 - protein, 359 aa, Glycine max
  Clone ID: PAT_MRT3847_9475C.1.pep
MGGFMICIIICCFRYKLLIQPIKLCSTTKSDQDIEAFLKNKGAVAQKRYKFSEVKKMTNSFKVKLGQGGFGAVYKGQLPTGCPVAVKLLNSSKGNGEEFTNEVASISRTSHVNIVTLLGFCLKGRKKALIYEFMANGSLDKFIYNRGPETIASLRWQNLYQISIGIARGLEYLHRGCNTRILHFDIKPHNILLDENFCPKISDFGLAKLCPRKESIISMSDTRGTLGYVAPEMWNRHFGGVSHKSDVYSYGMMLLEMVGGRKNIDAEASRTSEIYFPHLAYKRLELDNDLRPDEVMTTEENEIAKRMTIVGLWCIQTFPNDRPIMSRVIEMLEGSMNSLEMPPKPMLSSPTRSATESSS

SEQ ID NO: 279886 - protein, 134 aa, Glycine max
  Clone ID: PAT_MRT3847_94760C.1.pep
RIDRAIQMHNSLEERLQQLRNLPCVHKKPLSRAERKFKSELDHFKEVELDALHSSVDAVSARLRRHLQASKANHQQQKTPGKKSYAGDDQMSLLKSSLEKLSLLNTENSKKVELVESSLRNKERSSRESSLPMP

SEQ ID NO: 279887 - protein, 197 aa, Glycine max
  unsure (1)..(197): unsure at all Xaa locations
  Clone ID: PAT_MRT3847_94761C.1.pep
RVRILCNLSRIFLQPVEPGRTRKASSLCPVDFSFGGDHFWDRFSVFLLFSNGAIYVLCPVVPFGSLFKCESLVEIYNDAHTFGKISANSVAANNSKLAISWLEAAFPELQNQETKGDSLSLLKAHSYALFDASLVLQGPLRRVGQDGNEEFSXRSAEXXRVVLVSFLYNLVSKDSYFGDXPXVVGQLQIDALADEIQ

SEQ ID NO: 279888 - protein, 47 aa, Glycine max
  Clone ID: PAT_MRT3847_94762C.1.pep
FSKDSTQKNQHPIYAAITKYIIFNICVFPFLPKNLTCKTIYFSYLYQ

SEQ ID NO: 279889 - protein, 49 aa, Glycine max
  Clone ID: PAT_MRT3847_94763C.1.pep
NGKHFFYSPELEYLKGEYESKLAPNRGNNYSMMTRKHIKLFNLRTKMQL

SEQ ID NO: 279890 - protein, 33 aa, Glycine max
  Clone ID: PAT_MRT3847_94764C.1.pep
KLESYRMTDLRMSVYKSHVHRVILDTVNQDHAQ

SEQ ID NO: 279891 - protein, 96 aa, Glycine max
  unsure (1)..(96): unsure at all Xaa locations
  Clone ID: PAT_MRT3847_94765C.1.pep
MQKHVSKDGANKWVSVLHKFTGKSQATTDCTXSIGSHSEPSRVNDDSSDVWDIEPMRHGPQGVPKDMFAMLHLFCATYSHLLLVLDDIEFYEKQVP

SEQ ID NO: 279892 - protein, 74 aa, Glycine max
  Clone ID: PAT_MRT3847_94766C.1.pep
DLYIHVPVSYVSYLVVSRCPCWSLCCIACYNHIDTHYHAWTKHMNFPIMLYSASNWEEEYLWVLFIICLLKNYF

SEQ ID NO: 279893 - protein, 66 aa, Glycine max
  unsure (1)..(66): unsure at all Xaa locations
  Clone ID: PAT_MRT3847_94767C.1.pep
LSIXMDIYVMFXIESNFDCXLQSXFLXWXXXLXXGXXSXKXSVVXXXXXFVXYXNTLMHMGKRFIE

SEQ ID NO: 279894 - protein, 120 aa, Glycine max
  Clone ID: PAT_MRT3847_94768C.1.pep
LCLLPQPNALNGHGLRHYHPDPATRLLAARKASDPKKDPPADDKAGTAENKAPKEETSPKDPPAAQRATTATPGPATGLPGNPSETTATPGPHNDPRHKEPARTDRKRPTTKPEGRASTE

SEQ ID NO: 279895 - protein, 89 aa, Glycine max
  Clone ID: PAT_MRT3847_94769C.1.pep
VTLCRKGGSEVVADMASVPGVERIIWELMAVGSVRGRRKAATLLRILRRWAAGLDGGENEGFPTTTTMVASSTTTVVVPTTTTTTSLAQ

SEQ ID NO: 279896 - protein, 81 aa, Glycine max
  Clone ID: PAT_MRT3847_9476C.1.pep
FWGAIPGKMPQGPCGFSQLSPGGFPWFLGTRVGLPLVPLNPLFLRGQVRFKAQGFSSPNSKPVHGCFTSLGLVAWAFTGCF

SEQ ID NO: 279897 - protein, 74 aa, Glycine max
  Clone ID: PAT_MRT3847_94770C.1.pep
IETEMHSLYLGTFTTTLITGRHYRHRHHGNKKGYLSSLVNTTSDTRTDTKNLQDHHQSVLYIQSNDHRIQDTIS

SEQ ID NO: 279898 - protein, 144 aa, Glycine max
  unsure (1)..(144): unsure at all Xaa locations
  Clone ID: PAT_MRT3847_94771C.1.pep
KKIWVVSPENKKVWGRTPSKHFREKFPQNGVGFTLPKREKPPAERDLFPFQKKGEGPPNPNSPAQVEKFFAWGGDPRGHFKQRETGGVEPPLVSVLAQKEAPDPQSGGVKKPRLKTXKGSIGEQWGGQFDPGWEKTLQELGPPF

SEQ ID NO: 279899 - protein, 85 aa, Glycine max
  Clone ID: PAT_MRT3847_94772C.1.pep
GNAICASVEEMKQLESLNITAIAQDEIIDLNSISSLPQLRRLHLKARLEKMPNWISTLEFLVKIRLALSNLKDDPLRSLEKLPGW

SEQ ID NO: 279900 - protein, 75 aa, Glycine max
  unsure (1)..(75): unsure at all Xaa locations
  Clone ID: PAT_MRT3847_94773C.1.pep
EIFTXRWNTLMRGRASGSKVPPAFFLRWGGGAVFSVTGTVPGGFPSYLRTRPAASXGGIEXPRFGCDVCMPIFTG

SEQ ID NO: 279901 - protein, 369 aa, Glycine max
  Clone ID: PAT_MRT3847_94774C.1.pep
MLIFLKSKSIIPGSSPYVTITHPYRNSRAASLCLNFPSFSLFLSPSHALGSTRTNSDPPPSHTQPAPPPDPTMSRASSAADSAASGEIILFGVRVVVDSMRKSVSMSNLSQYEHPQDATNNKDALAAGYASADDAAPQNSGRLRERERKRGVPWTEEEHKLFLVGLQKVGKGDWRGISKNYVKTRTPTQVASHAQKYFLRRSNLNRRRRRSSLFDITTDTVSAIPMEGEQVQNQDTLCHSQQQSPVFPAETSKINGFPAMPVYQFGVGSSGVISVQGALETQWKNSLWDKETWKNTMCQTRPLQCLVSSPPVLLVLPLTHHRHCPWGYPSHLTKDRHHQDIQLYMPCNVSAMEIASLVLLENMVLGFTD

SEQ ID NO: 279902 - protein, 54 aa, Glycine max
  Clone ID: PAT_MRT3847_94775C.1.pep
ESSLPVPSSLKNDLYIIVNHLFINLKWHIVNPGGPLFASIEIGLYLMCLFHVAV

SEQ ID NO: 279903 - protein, 595 aa, Glycine max
  Clone ID: PAT_MRT3847_94776C.1.pep
MQLHSSPHSHSETLCSLSSLFYFYVTLSLKPYPSNPQSMAILSQSTASFSFSFSFVSTRTDSTRLTRFPSRVTFRARSPPRRHALVSSRLNSSRSPDAGGSLSPDNGSGDVAYQLHHDFSPRRRRRGSPVFVTLPVNSVGREGRVARPKAMMFSLKALATAGVEGVVIEIWWGLVEKNKPRVYDWRGYEELVAMACKCGLKVRVVLAFHQHGTGPDDPNWIPLPLWVLDEIQKDIELAYCDRFGRRNIEYISLGCDILPVLHGRSPIQAYADFMRNFRDTFGSLLGVIITGVQIGMGPGGELRYPSFSSQEPNLAWPHELGEFQCYDKYMLASLNASARNIGKREWGNGGPFGSGSLMQNPEHTDFFKNDGGSWDTPYGKFFLEWYSDMLLLHGERICREAETIFRGSEVHISAKLAAIHWHYVTQSHPSELTAGYYNTSNRDGYLPIARMFSKYGFSMCCSCFEMQDAVMQKINPDGSPEGFLRQLLLAARLCDISLEGQNFSTNLDDGAFTQVLKMSKFYSDGIEKRSFSFNFVRMDKRLFESRNWDRFTRFVRQMSNGNIFRARLNSVRDVRLKTTPVVAAVGLLYHLYQHS

SEQ ID NO: 279904 - protein, 87 aa, Glycine max
  unsure (1)..(87): unsure at all Xaa locations
  Clone ID: PAT_MRT3847_94777C.1.pep
AEQNEKLVLKQPKEFINTNKTVEAQRPGRRGNRFWNSIGLGFKTPMEPSNEPILTXSDHFTDHVYIRGPILAGTCHSAKMNQTIIVK

SEQ ID NO: 279905 - protein, 41 aa, Glycine max
  Clone ID: PAT_MRT3847_94778C.1.pep
YGASSLFQSFPSHLVIPSNTLPPFQLYLDGTAPSMAVVSST

SEQ ID NO: 279906 - protein, 182 aa, Glycine max
  Clone ID: PAT_MRT3847_94779C.1.pep
SARGQIWNDSGKVIGRCELIPAEEREQKVEGPFAGLQGLRVIADGKVADEDENVVGEIVEGNAKRLVGMAVDEDGDILDKYGNVKGHAEPLPDEEEEAPADLSILDGLTLNKQGYLVDANGNPVGRLVEGNVKDLAGRKSDGEGQIHGDTGKVAGRCELIPDHERVSKQEGPFAGFEGLRVV

SEQ ID NO: 279907 - protein, 106 aa, Glycine max
  Clone ID: PAT_MRT3847_9477C.1.pep
KDHSFPSFYAVLEGDVAPKVPWLFLGGRCFWTVFRAFFVFLSLFCWRGARKILWIVLGVTLAGPSPETFFSSFPPSFHGPVLPAKLMASCGLVHVKIIALLRLFGF

SEQ ID NO: 279908 - protein, 102 aa, Glycine max
  unsure (1)..(102): unsure at all Xaa locations
  Clone ID: PAT_MRT3847_94780C.1.pep
SSKSAALVLAFCKTANILLDDKLTAQVLDFGTSKLVPNDEFEIATLXQGTCGYLNFXYLGRCXLTNKXDVNSFGVVLLELLTTKKALYLGGSKENRGGGLAS

SEQ ID NO: 279909 - protein, 78 aa, Glycine max
  Clone ID: PAT_MRT3847_94781C.1.pep
KWKGEGLIRAPRKKKGPQNWKTPPKLFKPNPPWVIRAQKTGPPFCPIWGPPDFFFPKKTDLFKKGPLGKKGGKKKPVF

SEQ ID NO: 279910 - protein, 365 aa, Glycine max
  Clone ID: PAT_MRT3847_94782C.1.pep
MATSENNNARPQRVAKKRAAAAICELHRNAAKRKRVVLGDLTNVSSNYVAVTEKEIQKQKKVKREQPARPVSTPEKVEERHDPQLCMPYVSDIYEYLRGMEVDPSKRPLMDYVQKIQRDVNANMRGVLVDWLVEVAEEYKLVSDTLYFSVAYIDRFLSLNILSRQRLQLLGVASMLIASKYEEIKPPEVEDFCYITDNTYSKEEVVNMEAEILKALKFELGGPTVKTFLRRFSRVGQEGVDTSDLQFEFLSCYLAELSLLDYNCIKFLPSLVAASVVFLARFMFSTKTHPWNSALHQLTRYKPADLKECVLNLHDLYLRRSRGASLQAVREKYKQHKFKCVATTPSPPKIPLSFFEFEGQILRQL

SEQ ID NO: 279911 - protein, 58 aa, Glycine max
  unsure (1)..(58): unsure at all Xaa locations
  Clone ID: PAT_MRT3847_94783C.1.pep
VGGHEEKILVLVRLRPLSEKEIDVNETGDWECINDTTILYRNTLREGSTFPSAXTFDR

SEQ ID NO: 279912 - protein, 136 aa, Glycine max
  Clone ID: PAT_MRT3847_94784C.1.pep
AWSWARDFLNKDVVFKTDEECLPAFQTLKERLVSAPVMVALNWSQEFELLCDASDYAIGAVLGQQKNNVFPSIYYASKVLNDAQLNYATTKKELLAFVYTLEKLRSYLVGSKVIIFIDHAAIKHLLTKVDSKPRLI

SEQ ID NO: 279913 - protein, 222 aa, Glycine max
  Clone ID: PAT_MRT3847_94785C.1.pep
MIADSSSLNTPSALPSSSQNRGTGVTNTTLSAFGSLIKLLPTGTVFVFQFVNPVLTNSGDCNATSKWLCSILLVLCGFSCAFSSFTDSYTGSDNQRHYGIVTTKGLWPSPASNTVDLSTYKLKFGDLVHAVLSLSVFAVLGLLDTNTVHCFYPGFESTQKRLLQVLPTAIGVFAGGLFMIFPNDRHGIGYPLTSDSNDTSPKSNDTTASPPQNINPNDSTTV

SEQ ID NO: 279914 - protein, 71 aa, Glycine max
  Clone ID: PAT_MRT3847_94786C.1.pep
RPLSSPIGLSSTPSSPFSTPTSRMRATAEPSTFPFTLYGLTSSGGFCFSCRECDPPNDRCHISDQAYCGSD

SEQ ID NO: 279915 - protein, 72 aa, Glycine max
  unsure (1)..(72): unsure at all Xaa locations
  Clone ID: PAT_MRT3847_94787C.1.pep
LGLSVGVKYRSWPAKWLPDVMPHSLKVRAVAMFEAVQEIAIYIHRFHNLDLFQQGWYQIKXTMRWEDDEDVS

SEQ ID NO: 279916 - protein, 144 aa, Glycine max
  unsure (1)..(144): unsure at all Xaa locations
  Clone ID: PAT_MRT3847_94788C.1.pep
MPWARLSGSPRLDVAIDMGNPFLNLTVDGFLKIGAVAATRSAAEDTYHIXIQKGNISSHDFEKTLKKMCKEGVYWGTIAGVYVGMEYGVERIRGTRDWKNAMIGGAVTGALVSAASNNKKDKIAIDAITGAAIATAAEFINYLT

SEQ ID NO: 279917 - protein, 69 aa, Glycine max
  Clone ID: PAT_MRT3847_94789C.1.pep
MPWVRLSESPRLDVAIDMGNPFLNLTVDGFLKIGAVAATRSAAEDTYHIIQKGNISSRDFEKTLKKMCK

SEQ ID NO: 279918 - protein, 61 aa, Glycine max
  Clone ID: PAT_MRT3847_9478C.1.pep
LIVSHMCRIIRALSKVKATMLEILKGSNNQSNNIHSHHIKKQKMTNKLIFGSIRLHFNWCY

SEQ ID NO: 279919 - protein, 85 aa, Glycine max
  Clone ID: PAT_MRT3847_94790C.1.pep
EWDSCSTTGWHARSNADNPCQATTSHRDLDIHRDRAHPGHLGSVKNAAVTAFVCVSNSYHIATQRSGPLRSAVGTVVDTVSTVLG

SEQ ID NO: 279920 - protein, 84 aa, Glycine max
  unsure (1)..(84): unsure at all Xaa locations
  Clone ID: PAT_MRT3847_94791C.1.pep
IDFPKVIKTFIXQCIXGSQSSSIIKLQSQIASSRPKQCISIFQKEHRNHQSYISYQAPIITYLISHLAIKSQAHPPIFQFQLRS

SEQ ID NO: 279921 - protein, 115 aa, Glycine max
  unsure (1)..(115): unsure at all Xaa locations
  Clone ID: PAT_MRT3847_94792C.1.pep
NSARATYPASFKDGYSNVSVYSRGDYPVVAESIAADDALELTLSPETVSYVSTXGPIPDHADACIHVENTETVNDAFDGSKSVSILLQTTKGNEIRPVGVDIEKDAAVSTSGERL

SEQ ID NO: 279922 - protein, 99 aa, Glycine max
  Clone ID: PAT_MRT3847_94793C.1.pep
FICWLFNNLVFVKLQTDEINRLNGLYKRMLSNWGVKLFEGEGKIVGPNEVEVTQLDGTKLSYSAKHILIATGGRAQRPNIPGQVNLPVLKYHCKMFLLT

SEQ ID NO: 279923 - protein, 52 aa, Glycine max
  Clone ID: PAT_MRT3847_94794C.1.pep
REGTVASSKKLSLRFGFSISVVIVRVKHRLNPQSDYCHFPKSQISYQRSSTR

SEQ ID NO: 279924 - protein, 142 aa, Glycine max
  Clone ID: PAT_MRT3847_94795C.1.pep
SNSKGKTDDCGQKSESVNEKIDEKTQNLNSSHESQEVAVEHGSTDRTSSPSDNGLLCNNAPASVKANDRNSERSTSADSVSKNLTQGVDIIQDSQPARSIEISAPRGTDSTRNAKEFKLNPAAKTFSPSFVNPISATSAANM

SEQ ID NO: 279925 - protein, 76 aa, Glycine max
  unsure (1)..(76): unsure at all Xaa locations
  Clone ID: PAT_MRT3847_94796C.1.pep
SLEKNTKLIFCICTCYIMXRWSKQLLSTNLQFLKSVAIRADQKSYSYKQLCLIGTEDIQSLVWQVMHRQESSVDLE

SEQ ID NO: 279926 - protein, 40 aa, Glycine max
  Clone ID: PAT_MRT3847_94797C.1.pep
LIKTTLGHSHRVIPKSEYFFCFHRFQFTMLEHSTPTSADT

SEQ ID NO: 279927 - protein, 65 aa, Glycine max
  unsure (1)..(65): unsure at all Xaa locations
  Clone ID: PAT_MRT3847_94798C.1.pep
ALRPTLSTTLGVIFLVIVVIVLIIVDGFLIVIVIVXVXQKKETXRKRRHYNILWYDVMINDHIIY

SEQ ID NO: 279928 - protein, 79 aa, Glycine max
  unsure (1)..(79): unsure at all Xaa locations
  Clone ID: PAT_MRT3847_94799C.1.pep
PAAQLLLSPCLDIRSIKGLFESFFINLSGGVVSDASSKSLISVLDAESQSAYRSSLLRSRWFFSFAELLPGXPLXSXFX

SEQ ID NO: 279929 - protein, 74 aa, Glycine max
  Clone ID: PAT_MRT3847_947C.1.pep
TVQGPVTTRCNIVVCMYVVSLVIRVLSLSSNLKARNLKGFNFITCRLVKLVWYRNWLNPLKTLYFKILDGLCSY

SEQ ID NO: 279930 - protein, 61 aa, Glycine max
  Clone ID: PAT_MRT3847_94800C.1.pep
MSDAPPSPTHESGGEQSPRGSSSVARQQDRDLPIANIRRIMKKALPPNGGIGEDARDTVQE

SEQ ID NO: 279931 - protein, 90 aa, Glycine max
  Clone ID: PAT_MRT3847_94801C.1.pep
SKIFQTSIPFYSSSLTESLQNKIKAQRPIHPKVNHPKLSEILLQIFLQLRDILSPKNIPESTICPRVRPRVRFKTCCLRSFNKRLNFSPR

SEQ ID NO: 279932 - protein, 88 aa, Glycine max
  Clone ID: PAT_MRT3847_94802C.1.pep
ESGRNTYTRLRPNLPLEHILLAKNPSLGETFSRKLEALISRPSLFNSWMEWGFRVSCGDLGILKGLHALSTLSLVKAESMGIVLGKNF

SEQ ID NO: 279933 - protein, 60 aa, Glycine max
  Clone ID: PAT_MRT3847_94803C.1.pep
RLKWAGFTPKKEREMEKNNLQKQRKRLEKKKMVLFLPQKELKLVNVEQKHPKQHFFPKLG

SEQ ID NO: 279934 - protein, 375 aa, Glycine max
  Clone ID: PAT_MRT3847_94804C.1.pep
VGLHSTSSAAYATPFCRSFLHRGPRASPWSTKLLRPFSEILDDLQLNDPFIRNWIDLLSFLLAGVKANAVLSAEMIYMFAEWYKPGCCLEYPLHGSAAIIDALVRGLEKFGGRISLQSHVENIVVENDRAIGVKLGSGQFIRAKKAVVSNASMWDTLKLLPKEVVPKSYSDRVNTTPQCDSFMHLHLGFDAEGIRSDLGIHHIVVNDWKRGVDADQNVVLISIPSVLSPNLAPHGKHVLHAYMPGTEPFELWEGLDRRSAEYRNLKAERSEVMWKAVERAVGTGFSREKCEVKLVGSPLTHERFLRRNRGTYGPAVQAGSDAFPGHSTPIAQLYCCGDSTFPGIGVPAVAASGAIVANSLVSVSQHSKLLDAIGI

SEQ ID NO: 279935 - protein, 46 aa, Glycine max
  Clone ID: PAT_MRT3847_94805C.1.pep
LPGPVSLFHWSVKGEHWADLYINRPCPLYALWAPYDLLPTPLAHNA

SEQ ID NO: 279936 - protein, 126 aa, Glycine max
  Clone ID: PAT_MRT3847_94806C.1.pep
FDSSKMNRVIRSSKLVLNTNIQMAKERSKLIVFGTLEELEQPMITLLLNSGHNENASLVSLTEEVLLFCEEGWGCGNVIDNDNSQPPMSSFSAPSPFLQVFPTSFKGCLSFNLATWSKSDSCFVSI

SEQ ID NO: 279937 - protein, 68 aa, Glycine max
  Clone ID: PAT_MRT3847_94807C.1.pep
KHLPQTSNPHHSHSFIILILVPFTFLYTPKQKKKKKSHKPHFLNLNPTQQQKKSKTKNLTLITQITHT

SEQ ID NO: 279938 - protein, 52 aa, Glycine max
  unsure (1)..(52): unsure at all Xaa locations
  Clone ID: PAT_MRT3847_94808C.1.pep
PDLYKETRGGSMVSEKLALCYTIXFFLLVKLAMFPLPVGCGLHSESGLCFKV

SEQ ID NO: 279939 - protein, 203 aa, Glycine max
  Clone ID: PAT_MRT3847_94809C.1.pep
TRFSTASMTTGFVILDENGVPYPDDVACVGEVGLFPLSLGASDRLLNADHEKVYFKGMPIYKEKILRRHGDIIKRTVDGYIVVQGRADDTMNLGGIKTSSVEIERVCDGADECILETAAVGVAIANRGPEQLVIFVVLKEGYNSSAETLKMKFTKAIQSNLNPLFKVSLVKIVPDFPRTSSNKILRRVMRDQMKLQLSVQSRL

SEQ ID NO: 279940 - protein, 78 aa, Glycine max
  Clone ID: PAT_MRT3847_9480C.1.pep
PRARGEPGPGQPPGTPKRIGPPPPPQNRALGEPPPATDYTGRPPGCEAHPHKTRTHLHLEQPQPPPKKKKSKKKTKTK

SEQ ID NO: 279941 - protein, 76 aa, Glycine max
  Clone ID: PAT_MRT3847_94810C.1.pep
GWIKPVFILAPPIDSNAKVLILKELTPPLGGFLRKKKPFFFAPPPPKSPSFDLGNAPREANFPLRGKKVTLCHDPS

SEQ ID NO: 279942 - protein, 66 aa, Glycine max
  Clone ID: PAT_MRT3847_94811C.1.pep
IRNEMRTFTLLCVKKFLYMWLCLICKSYSQKETTMRSSFDSDNALFEKDKLDGPELDTLGHALHKV

SEQ ID NO: 279943 - protein, 161 aa, Glycine max
  Clone ID: PAT_MRT3847_94812C.1.pep
MAHRYDSNPFDEEEVNPFSEPAVRGKTSSQSSYSGGAFYTTNPGSVAPATNSRLSPLNPEPADYNYGFGATVDIPLDPSTDLKKKEKELQAKEAELRKREQEVRRKEEAAARAGIVLEEKNWPPFFPIIHHDIANEIPIHLQRLQYVAFTSLLGLALGLTW

SEQ ID NO: 279944 - protein, 106 aa, Glycine max
  Clone ID: PAT_MRT3847_94813C.1.pep
MAHRYDSNPFDEEEVNPFSEPAVRGKTSSQSSYSGGAFYTTNPGSVAPATNSRLSPLNPEPADYNYGFGATVDIRLDPSMDLKKKEKELQAKENELRKREQEVRRK

SEQ ID NO: 279945 - protein, 139 aa, Glycine max
  Clone ID: PAT_MRT3847_94814C.1.pep
MGCAIINLLLIIFIYEASADTQTATEPEVVRTSQDFHYCCDYKQARGNYAANSPYQTNLNTLLSTLTSNTDIDYGFYNFTTGENPDKVYAIGLCRGDINPDECRNCLKLSRANLTELCPVQKDAIGWYEDDKCMLRYSD

SEQ ID NO: 279946 - protein, 72 aa, Glycine max
  unsure (1)..(72): unsure at all Xaa locations
  Clone ID: PAT_MRT3847_94815C.1.pep
XQSNLRPARAWNFYSNIFWAISSLGTNKTQVEHRKTPPFYPNPGVPKDCFSLWHKKSLFFNPTCRGERPPPI

SEQ ID NO: 279947 - protein, 50 aa, Glycine max
  Clone ID: PAT_MRT3847_94816C.1.pep
VEIVGVGSLNIQTCKNYWELVTTNFELKFILNFLDILTKIRKKKNQLIWM

SEQ ID NO: 279948 - protein, 154 aa, Glycine max
  Clone ID: PAT_MRT3847_94817C.1.pep
GNPVDPRVRLVYLKQHNQLLFRYSRCDQTQEALHLFVSLYRSGLSPDSYTMSCVLSVCAGSFNGTVGEQVHWQCVKCGLVHHLSVGNSLVDMYTKTGNVRDGRRVFDEMGDRDVVSWNSLLTGYSWNRFNDQVWELVCLVRGGGCGPGCCAVGA

SEQ ID NO: 279949 - protein, 78 aa, Glycine max
  unsure (1)..(78): unsure at all Xaa locations
  Clone ID: PAT_MRT3847_94818C.1.pep
FNILIVKNHHCIYFILKINKHSNPTNTNSHPNPLYAPLLERTTTIFSHSGDRPNERKKGNLNEDRLAXTIIDCYFLIT

SEQ ID NO: 279950 - protein, 92 aa, Glycine max
  unsure (1)..(92): unsure at all Xaa locations
  Clone ID: PAT_MRT3847_94819C.1.pep
MKKPPPPGVNNFFFFGKPPPSPLYSESKQGLRLIICSEFSVVCQRFVGSPPPPFFXPPPPPIXXDPPPPPRIIALISGPSPPGFRPQPPAVP

SEQ ID NO: 279951 - protein, 72 aa, Glycine max
  Clone ID: PAT_MRT3847_9481C.1.pep
PGKINRCLKGYFPFKGNKSMHVPMANGFCFSLQIRGPIFNPFGTNPLEILVNLKGPHKIIAIFCTICPMATG

SEQ ID NO: 279952 - protein, 57 aa, Glycine max
  Clone ID: PAT_MRT3847_94820C.1.pep
VKTYLKLCRKLLDKREHTYKTISGTANHTILREHTLSTVVFAVAVLAPWFLQLLGLT

SEQ ID NO: 279953 - protein, 57 aa, Glycine max
  unsure (1)..(57): unsure at all Xaa locations
  Clone ID: PAT_MRT3847_94821C.1.pep
XSGKYSXKYXLIIXLKFXMFYSXPCGMXXWFIWKAQTYSLINXPLSIDTMPHYIXFX

SEQ ID NO: 279954 - protein, 70 aa, Glycine max
  unsure (1)..(70): unsure at all Xaa locations
  Clone ID: PAT_MRT3847_94822C.1.pep
FRPSHLPNHSKVIXSFFVNSTAPHPVEGVQNLPPTVVMCYGLHLPLVVFYCYKARQIIVFMVLLVAGHGL

SEQ ID NO: 279955 - protein, 36 aa, Glycine max
  Clone ID: PAT_MRT3847_94823C.1.pep
SATQDEAMEVAVVQLDSLERRITSIAHYGAVPTDLR

SEQ ID NO: 279956 - protein, 62 aa, Glycine max
  Clone ID: PAT_MRT3847_94824C.1.pep
SLFSSITSTCLCPGVTATSLVLFSHFNYLLVFNYHFSVHLLIGHFNYNKLFRHFLFNALEPN

SEQ ID NO: 279957 - protein, 52 aa, Glycine max
  Clone ID: PAT_MRT3847_94825C.1.pep
ETEREIIVTKAVSGSRSTYDFSHLINNTLIPIIICYCSYGKPQHYSFHGRCR

SEQ ID NO: 279958 - protein, 121 aa, Glycine max
  Clone ID: PAT_MRT3847_94826C.1.pep
MAPALQASTAMLARRQLTSSSLVAARLFVAQQRGYATPQGPPPANFRTSRQVQWTWDKESTLDRVGKFFLMTEMARGMYVLLEQFFRPPYTIYYPFEKGPISPRFRGEHALRRYPSGEERC

SEQ ID NO: 279959 - protein, 68 aa, Glycine max
  Clone ID: PAT_MRT3847_94827C.1.pep
FFFFFFFFFVWVFFFFFFGHKDSFIFCLFDSPRRKGPFLIRCYRFEKHQSITLGSNLGAFQQEKFEFP

SEQ ID NO: 279960 - protein, 176 aa, Glycine max
  Clone ID: PAT_MRT3847_94828C.1.pep
MEPRLLTIFFVVLSFSPFVQSLVRHYKFSVVLKNTTKLCSTKSFVTVNGQCPGPTLYAREDDTVIVKVTNHVKYNITIHWHGIKQLRTGWSDGPAYVTQCPIQPGQSYVYNFTINGQRGTLLWHAHITWLRATVYGGIVILPKRGISYPFPKPDKEKIIILGEWWKSDVEAILNQA

SEQ ID NO: 279961 - protein, 173 aa, Glycine max
  unsure (1)..(173): unsure at all Xaa locations
  Clone ID: PAT_MRT3847_94829C.1.pep
YLSEFPFTHANGTSMTLSLRHRTITSSNVRPLTLFLRHHTDSQLPYGPCCVFSTTKLRSLHQRRPPQRRGEQVRLPCGSSLPLSRLLRSSLNCTFHHSRCQIPFLLPHPSPLLTLQKKLLIPHLATFSALPSSPFHEKFPFLNSPRTFASNADSGVENDDDDDDGGDGDKXYD

SEQ ID NO: 279962 - protein, 49 aa, Glycine max
  unsure (1)..(49): unsure at all Xaa locations
  Clone ID: PAT_MRT3847_9482C.1.pep
KQKPIWMMKPEQITKEEYAAFXESLTNDGEQHLAVKHFAVEGQLEFKAV

SEQ ID NO: 279963 - protein, 61 aa, Glycine max
  Clone ID: PAT_MRT3847_94830C.1.pep
IIGFYLAGPLSWHGLLIQGFLHQELKSQQVCILKTPRHLTAVAQSFSTILCSCQFGPSIRR

SEQ ID NO: 279964 - protein, 112 aa, Glycine max
  Clone ID: PAT_MRT3847_94831C.1.pep
PRRPICFSRTDVIERDVLTVLSTTLLLMWACSARHVSSSTTDHSEKNINYDVNHDPVFSPSLEHSIHLHKKHSVNSGQARQSLRPRRAFHHRPLNHHTTLLIRCHTPGSPYP

SEQ ID NO: 279965 - protein, 148 aa, Glycine max
  Clone ID: PAT_MRT3847_94832C.1.pep
IFVNCLYPVSQLPSEAVVVNVTCGSGRGGLPTTACTTDDLNKRFLYINKRFRTRLGKGKKTGFLTIVYLFASYFYCLVLFAFYRKDISQFFTPSYILFFPPTSYDIPVIKSFKLSCMYCATLFFHFCLPIFFLIFFLLFILRRFYICS

SEQ ID NO: 279966 - protein, 53 aa, Glycine max
  unsure (1)..(53): unsure at all Xaa locations
  Clone ID: PAT_MRT3847_94833C.1.pep
CYIQNCEXXKKKKKKKKKKKKKKKKKKKKKKKKKKKKKKKKKKKKKKKXGGAV

SEQ ID NO: 279967 - protein, 67 aa, Glycine max
  Clone ID: PAT_MRT3847_94834C.1.pep
MLLGLLCLLKHLSVQPPRSFSSASPDSRFFRAPLVARVISLRAVSAYFSSVVHLCFCPLSFLLPPVQ

SEQ ID NO: 279968 - protein, 60 aa, Glycine max
  unsure (1)..(60): unsure at all Xaa locations
  Clone ID: PAT_MRT3847_94835C.1.pep
XEIHVXLTKMKTILYQHETMXXXPRNGRXAYKSSCQRYXRXLQGPPXEKIGDXEXTRHLD

SEQ ID NO: 279969 - protein, 103 aa, Glycine max
  Clone ID: PAT_MRT3847_94836C.1.pep
GRVGFFVMDIEKDQQITIILGRSYMRINHVTMNIRKGMYTLREGKQQMFYYIQGIEDFPNKSAHQKHHDSPHAIHQAIDVKETLIRRQPGILTLTFSFCILNS

SEQ ID NO: 279970 - protein, 35 aa, Glycine max
  Clone ID: PAT_MRT3847_94837C.1.pep
ALSLPITVDSFLCIGSRSPEKIKRLYFGHLDSPFS

SEQ ID NO: 279971 - protein, 125 aa, Glycine max
  unsure (1)..(125): unsure at all Xaa locations
  Clone ID: PAT_MRT3847_94838C.1.pep
SVSAKERMRESTSKRYRNFHIPWEWMLDIGIIGQMKLSSLKMAKEFMKRMTKELVSNELLQEDNLFVQGVKFAFRVHQPFXFAGGFDLETIQAFQELKKIGCAIPSYSNLIKCPKLVKTCQKPVC

SEQ ID NO: 279972 - protein, 98 aa, Glycine max
  Clone ID: PAT_MRT3847_94839C.1.pep
MVSRYHSLYVSPSIMERFVLIRSYLSLEFIPLNFPEHKDLCFLLPTPELQACTINILTVAVYRYRYAATTCGTSHRTSSLVATVLFKDWGTAVALFVF

SEQ ID NO: 279973 - protein, 48 aa, Glycine max
  Clone ID: PAT_MRT3847_9483C.1.pep
VAAVAREVVLVIVVMASERRVDVQVVREGIEVSHVCDCQFLSLHMGLS

SEQ ID NO: 279974 - protein, 79 aa, Glycine max
  Clone ID: PAT_MRT3847_94840C.1.pep
SLAQEARIVEYRITAMVGKHTSGIDFAHAVFNGAFYGALHRWDKESGAIKQTMKTGNACYGGPYSRATSSMLVTNGTLC

SEQ ID NO: 279975 - protein, 110 aa, Glycine max
  unsure (1)..(110): unsure at all Xaa locations
  Clone ID: PAT_MRT3847_94841C.1.pep
LTYSIKTAWLIIWLKPVRGASQKKSIFDVKAPGSARGEQGANRPYXFASSQTIYYLDGSQPGDYGFDPTWSXDPQGAGGFIEPRWLAYCENKNWRFAMLSASGAIDPVVL

SEQ ID NO: 279976 - protein, 237 aa, Glycine max
  unsure (1)..(237): unsure at all Xaa locations
  Clone ID: PAT_MRT3847_94842C.1.pep
HGFLVWLAGFSSGTFKFSKKESRCIRKAGSITAKFELKPPPYPLNSLEPIMSEETIEYHWGKHHRTYVDNLNRQIDGTDLDGNSLEDTMVILYNKQHILPVSLLHRFMQHAFSWEISKPICCCEHYVSNRRAGNTILTFSFQYLXSVEIYVDLTNSXNEIHIFSETXYEFYPTKECAPKRVPKSVLLALFIPLLARTFLLSFQNRRPDYISVFMDKLVSWDAVSSRLEQAKALITSA

SEQ ID NO: 279977 - protein, 120 aa, Glycine max
  Clone ID: PAT_MRT3847_94843C.1.pep
RTYTIYAAGVFFGPYSAHFLSHYTIASFASITPTPKFSPSPSRGEKTLFLQARPMYFMRFTKAHQLMLFNETDPVTPEKGRRKATKKGVTQAKKTVEYQKGVDVNGMNVFIRKLAPPPTR

SEQ ID NO: 279978 - protein, 69 aa, Glycine max
  Clone ID: PAT_MRT3847_94844C.1.pep
TPPLLSWTTIRHYRKKDHSLILSYHSINPISLTHLQKLSNLIRIRRPMISEATTTVISIIDVIKRLMIH

SEQ ID NO: 279979 - protein, 53 aa, Glycine max
  Clone ID: PAT_MRT3847_94845C.1.pep
CNNIPMKFVRMMAHAIARTSIDHILCLLLLCFLVVVVLSLLYCIGDLIMNEVI

SEQ ID NO: 279980 - protein, 51 aa, Glycine max
  Clone ID: PAT_MRT3847_94846C.1.pep
SSHRMSSFWNKLSCIFLITTTTQVVFMYESRLVAAHNSAGSNSSRYYNAVI

SEQ ID NO: 279981 - protein, 52 aa, Glycine max
  Clone ID: PAT_MRT3847_94847C.1.pep
ERVAQVFPPRCCLSTKNTDINNSVFVIRARIAIKVFYTMSPRQILQCHFISR

SEQ ID NO: 279982 - protein, 96 aa, Glycine max
  Clone ID: PAT_MRT3847_94848C.1.pep
SKGYLKEYLENADLYGGLSMAASTAVLNSEGLARASTDPLIEIVGSFPDFTHTVSILFRKQTQCPQKDDLYSMMFFELASNVKRIAVCFKSYLTVV

SEQ ID NO: 279983 - protein, 98 aa, Glycine max
  Clone ID: PAT_MRT3847_94849C.1.pep
IIHFWHWYDQECFHHFCHHSHHNLRSHCYHLHHHNLHSHCYHLHHNLHYHWYLHHHCYLHLHKLHPRYLHIYHYKLHHHHAPRLLYSVWHSLRVMHLE

SEQ ID NO: 279984 - protein, 100 aa, Glycine max
  Clone ID: PAT_MRT3847_9484C.1.pep
MGGKEQDVLFGANKFPERHPIGTAAHSQYYGKDYHEPAPAPMVDPTEFTSWSFYRARIAYVVATFLFLYITVLTVMGVVGAKSMCSTVGIQRIAWGFGGM

SEQ ID NO: 279985 - protein, 44 aa, Glycine max
  Clone ID: PAT_MRT3847_94850C.1.pep
FYYSYNTFFIKTYSITHFPTPIFINPHPTPIYYIITSTYLQLFH

SEQ ID NO: 279986 - protein, 97 aa, Glycine max
  Clone ID: PAT_MRT3847_94851C.1.pep
RGISYSVDRDYKQSVINIKVLVFFVATILVAWLCHTYDMYPRRMNTGHSASTPEVKFPSCTLALEAHNIFGFETNPNECVEATNEYIHGEPYRSYSR

SEQ ID NO: 279987 - protein, 55 aa, Glycine max
  Clone ID: PAT_MRT3847_94852C.1.pep
CYWLLYLEWYLIILIFFYVINYIFLVFCFFIFLFFLCILFLYSFSLFNSFLLLFC

SEQ ID NO: 279988 - protein, 215 aa, Glycine max
  Clone ID: PAT_MRT3847_94853C.1.pep
MDHLRFNKTTLVLIGTLSCLLLSITAVPSTRVLELAPSEAPTAEPIASGISLFDNLLAKESSPMILKFCTGTENPTLCAETIAPYLTGTFDPIQALETEINATLEKAEEIAGNIKKMLDDPTTTKNAMDALGICQSQYDNILDNIKETVELVGNQNVVDAWYRFSSVLSYKEACEDAFKESPGVDMPFPEDNTKLFQLSGNCLAVMDGIVNNHKM

SEQ ID NO: 279989 - protein, 78 aa, Glycine max
  Clone ID: PAT_MRT3847_94854C.1.pep
DHWPLSITLIRTNLIHLSGGLLYSEINNWCKLLLIPIHTVLLTHHFLPGNLHTHHKICTAIKILDWTLNYITILPHSF

SEQ ID NO: 279990 - protein, 122 aa, Glycine max
  unsure (1)..(122): unsure at all Xaa locations
  Clone ID: PAT_MRT3847_94855C.1.pep
VFPPSGKIKFFTLSYLPYLDDAHLSKEVQYLLKKGWITCLEFHLDLXFKSREHPYVSTXYYDGRYWTMWKLPMFACTAASHVLTELKDAKTAYPNCCIRIIRFDIFRQEQCITFIFYEPPSF

SEQ ID NO: 279991 - protein, 47 aa, Glycine max
  Clone ID: PAT_MRT3847_94856C.1.pep
TPLKKLASGYQISELPLSCFGVLLLGFASRGRGLSARFKAESPPRKG

SEQ ID NO: 279992 - protein, 117 aa, Glycine max
  Clone ID: PAT_MRT3847_94857C.1.pep
GKKSPQSTCPAIGCLTCLENGAYSSSDYEARTGWVSGTKLKVAAATFLLRNELYPTKGCTKMKSSVRGGPSAAHGYIEYGPRSWVWLVMLFPVPAGPLATPWRACCGALTEKGGRQA

SEQ ID NO: 279993 - protein, 130 aa, Glycine max
  unsure (1)..(130): unsure at all Xaa locations
  Clone ID: PAT_MRT3847_94858C.1.pep
MEMEHRVIPFSTRGWRRTYDVFLSFRGEDTRLGFTGHLYNTLRHIGINTFMDDEALERGEQISEAIFNAFEESGIAIVVFSKNYAYSTWCLEXLSKSSFVSKSKELKVYPLFYNEDPSEVRYQRASYGQQ

SEQ ID NO: 279994 - protein, 85 aa, Glycine max
  Clone ID: PAT_MRT3847_94859C.1.pep
VSRSGKNIRIVASMRCDNCSSNYENCQSNNLKFWHTEIHSHSHVGPVDSGIEIQNALFVTETHGADHDFRYLGDTSSSYSCYGSY

SEQ ID NO: 279995 - protein, 98 aa, Glycine max
  Clone ID: PAT_MRT3847_9485C.1.pep
SFRYNWRCSSVFRVRSPSFLAAICSYYLLGAPFFLRHVSVWLCRAFVCRFRVANVCYPLLSAGAPGPGLLFVFGFFWPGAGCNFVFPPLQLLNLKITT

SEQ ID NO: 279996 - protein, 55 aa, Glycine max
  Clone ID: PAT_MRT3847_94860C.1.pep
GSRKEIERMRVEAEAKRGEMELKRTEIIANTQLEIAKIFASVNKGVDSSLRIGRS

SEQ ID NO: 279997 - protein, 350 aa, Glycine max
  Clone ID: PAT_MRT3847_94861C.1.pep
MLQEMWNAPPGLRPSKSAPCSPAKPLGVVPRTRSESFHVAHKVPVGDTPYVRAKNVQLVDKDPERAIPLFWAAINAGDRVDSALKDMAIVMKQQNRAEEAIEAIKSLRSRCSDQAQESLDNILLDLYKRCGRLDDQIGLLKHKLYLIQQGLAFNGKRTKTARSQGKKFQVSVEQEATRLLGNLGWALMQQNNYIEAEDAYRRALSIAPDNNKMCNLGICLMKQGRIGEAKETLYRVKPAVMDGPRGSDSHLKAYERAQQMLKDLESEMMNKGVDRIEQSRLFEAFLGSSSIWQPQPCKDHHHTTTLLATTTINSAKIHDEFADENINSNIMLTNHTALPPSKGSNNNNSN

SEQ ID NO: 279998 - protein, 126 aa, Glycine max
  unsure (1)..(126): unsure at all Xaa locations
  Clone ID: PAT_MRT3847_94862C.1.pep
MLQDMWNAPPGFRPSKSAPSSPAKPLGMVPRTRSETFHVAHKVPIGDTPYVRAKNVQLVDKDPERAIPLFWAAINAGDRVDSAXLKDMAIVMKQQNRAEEAXIEAIKSLXRSRCSDPAXQESLDNF

SEQ ID NO: 279999 - protein, 102 aa, Glycine max
  Clone ID: PAT_MRT3847_94863C.1.pep
KLERYHSFGGPVAPTKVIGPPITQAFIEKYCAQRQGEGDAPQAAGAPPPPHYAGQAGAFYMEQYLRHLVWQQGGNHRAHVRTHDCVYHMSLIMQRQGFAPFL

SEQ ID NO: 280000 - protein, 110 aa, Glycine max
  Clone ID: PAT_MRT3847_94864C.1.pep
TGKTYTSTWKTHYYPFLKQDIHSPLTAMGQTLIKRGRGSKLNKPGLGKHNLGDPQPLNGKSKFKRLPRTQVLFKDLKKGTRLRLTPTGGPLNLKLENIPSNASKEPVVFF

SEQ ID NO: 280001 - protein, 62 aa, Glycine max
  Clone ID: PAT_MRT3847_94865C.1.pep
FAGKAFFNILTFNLVIATLLLLTFFTRHYTCFFYHAFREFTTWTTCFNKLRPFGILFIKLKC

SEQ ID NO: 280002 - protein, 50 aa, Glycine max
  Clone ID: PAT_MRT3847_94866C.1.pep
TSGNNICVNHLHARSLNLTIGTSHYSCSVIGVCDSSRRVVHTLHITLSRR

SEQ ID NO: 280003 - protein, 194 aa, Glycine max
  unsure (1)..(194): unsure at all Xaa locations
  Clone ID: PAT_MRT3847_94867C.1.pep
FVTGLTNKMEERHHTKWLVKKKKVVPRSEPNLNPRAAVGPVVSKRKAMQATTTRLINRIWGEYYSNHLPEDAKEGIASELKDEDEVEEQEENEDDDNEETILLEGTPKAHSASKQTKKFSAETEIRWEGEPEGKTSSGYPVYKQAIIRGXSYFCRKICVGXRLMKQMNFQTYIMLNICLNXKIGRKMFHGRMMQ

SEQ ID NO: 280004 - protein, 34 aa, Glycine max
  Clone ID: PAT_MRT3847_94868C.1.pep
CRHMTSRSALLSVTFRTGKLCRSSFIIFSYPRIY

SEQ ID NO: 280005 - protein, 62 aa, Glycine max
  Clone ID: PAT_MRT3847_94869C.1.pep
LALLAKTPAPYRPSRTVDTALFGKLGPPLCSLNDYSALVGMEVYYAALTRYTQPSMIAHQLL

SEQ ID NO: 280006 - protein, 51 aa, Glycine max
  Clone ID: PAT_MRT3847_9486C.1.pep
NTNNIYYNTHALKSAQHHLINHVRSFYQANTLSFSATNSTTLKHSTANHSD

SEQ ID NO: 280007 - protein, 103 aa, Glycine max
  Clone ID: PAT_MRT3847_94870C.1.pep
KLGSLTLQKRLAASMLKCGKGKVWLHTNEVNNISMTNSHDYIVKLVNDKFNIRNHTTIQTLSRTRRMNESNTKGRHSGYSTRNGTTEARLPTKLPWMMKTRVL

SEQ ID NO: 280008 - protein, 101 aa, Glycine max
  Clone ID: PAT_MRT3847_94871C.1.pep
RAKFLYVSLEIMCSSDCNQLKFSSVSNIDGATPLAADIGGQGTHIWSRRSHLGHCLVEITARLRQRHSKAWCGQRYWIPRMSLFMQRVLVIVSFSTMGFTA

SEQ ID NO: 280009 - protein, 65 aa, Glycine max
  Clone ID: PAT_MRT3847_94872C.1.pep
SATRIKIFTAVHELSSCTTLLSSRQTLLLPQLSVLDRRLTLIIVQLKLSHNGRPPDCHTLSGSRF

SEQ ID NO: 280010 - protein, 157 aa, Glycine max
  Clone ID: PAT_MRT3847_94873C.1.pep
EKKRGIFKKKTAGPQRGKQPQRTGFLLLTKKLKGLAKKPLRGSHPGGEGVFKTQKTVPSPRNKILITGNFRAMGHRGKKTPHKPVWGRKRGTFGKRGNLFQGWESNPHGGARNTTNFRPRPGGPFMEKGGPQWGGFGTLFGMDFWKKGFFGQISFWT

SEQ ID NO: 280011 - protein, 116 aa, Glycine max
  unsure (1)..(116): unsure at all Xaa locations
  Clone ID: PAT_MRT3847_94874C.1.pep
VATNIYQCLEGRIAEMQKAYCGNLGKEVLRLVIAXSDEAEQLRGRALSLIEWMXIAVVPTIPHIEEIRSMHRMMNAPDXHENTDLQKSIDLGRSQRARKDCPHMRASDDKLVLAST

SEQ ID NO: 280012 - protein, 52 aa, Glycine max
  Clone ID: PAT_MRT3847_94875C.1.pep
TLSVSPSPERFAHLLAQCHMLYVYDGQVECIPSLDYSCRLIAWCSSTPPLER

SEQ ID NO: 280013 - protein, 61 aa, Glycine max
  Clone ID: PAT_MRT3847_94876C.1.pep
GGRGILASVNIAVFLFEIASPIRNSDLELFSIPLLYGAKINHLIMVGEWWRLVTPMFLVQD

SEQ ID NO: 280014 - protein, 37 aa, Glycine max
  Clone ID: PAT_MRT3847_94877C.1.pep
AAQIKNRMPSHPVNNARPPPVQIQVQPVIQKHGCCSP

SEQ ID NO: 280015 - protein, 174 aa, Glycine max
  Clone ID: PAT_MRT3847_94878C.1.pep
KPGCFDAICPGFVQVHPRITLGQTIEPSFTGGLDGKDYIAIKVTQDSVSGHWWLHVEGSDGSEDVGYWPKEIFTHLRKGSSLIKFGGEAYGPPNIGSPPMGTGKLPKTSFPNSGFFARLQIVDSKFRELDVNPIDMKSYCDTSSDCYDLLYHGDQGAQFRQAFLFGGPGGQCGV

SEQ ID NO: 280016 - protein, 44 aa, Glycine max
  unsure (1)..(44): unsure at all Xaa locations
  Clone ID: PAT_MRT3847_94879C.1.pep
PTVSSXQTXTVYSLRINXXSASSXSXDAEAVAVVAMLXRSLTXR

SEQ ID NO: 280017 - protein, 72 aa, Glycine max
  Clone ID: PAT_MRT3847_9487C.1.pep
NQKGFHPKKSNISPVVQNPPIIFFPPGGQDSIPLIVMGKSNRFLNEKTPPLFFSLGVNCFPPQPIYFPYQGG

SEQ ID NO: 280018 - protein, 95 aa, Glycine max
  Clone ID: PAT_MRT3847_94880C.1.pep
MADNEDSVFDPSLLKKKKKKKTTAFDMDAAMAEGSPADASDNTDKENTEPASNVDNMDMDDLESFGKKKKKKKKAFNLEELDSALPTDTTADEPS

SEQ ID NO: 280019 - protein, 86 aa, Glycine max
  Clone ID: PAT_MRT3847_94881C.1.pep
KTKHMWSEMLKWTEEFGADTITEDFEFKELDEVLHYYPQGHDGLDQDGRPVYIERLCQFDATNMMHVTSMDRYVTYHAKELERTFD

SEQ ID NO: 280020 - protein, 114 aa, Glycine max
  unsure (1)..(114): unsure at all Xaa locations
  Clone ID: PAT_MRT3847_94882C.1.pep
PKENKKAPKERGVFKKPSKKKKSGKFFVLFNVNPWDNKPPIKKLEKTFPSFXKPGFFWGASQLVPLGYGVKKFQIIMPIFYALGPVDPLFXERFPVYPSPGYIQSCAIFAFPKI

SEQ ID NO: 280021 - protein, 261 aa, Glycine max
  Clone ID: PAT_MRT3847_94883C.1.pep
MAKLFLKQAKQYADARPSYPPQLFQFIASKTPSHYLAWDVGTGSGQAAKSLAAIYKNVIATDASDKQLEFAAKLPNVRYQHTPSTMSTAELEQMVASKGTIDLVTIAQALHWFDRPTFYEQVKWVLKKPHGIIAAWCYYLPRVSDAFDTVFDQFYSTNVSPYWDPARKWVDDNYRSIDFPFEPVDGADHTGPFEFVTETMMDLDDFLTYIRSWSAYQTAKEKGVELLAEDVVEKFKLAWGEDAKKVVKFPIYLRIGRTGDS

SEQ ID NO: 280022 - protein, 84 aa, Glycine max
  unsure (1)..(84): unsure at all Xaa locations
  Clone ID: PAT_MRT3847_94884C.1.pep
RSAAVGMTSSYTPTPLLEFGLQKDRGFIVEYYGRMSHVAHNVHQPQENESAEGKFLLXDIKSRSRLEKVSFSKAQFVSGKTFKI

SEQ ID NO: 280023 - protein, 142 aa, Glycine max
  Clone ID: PAT_MRT3847_94885C.1.pep
MYSSARAAALNIVPTSTGAAKAVALVLPTLKGKLNGIALRVPTPNVSVVDLVVQVSKKTFAEEVNAAFRESADNELQGILSVCDEPLVSVDFRCTDVSSTVDSSLTMVMGDDMVKVIAWYDNEWGYSQRVVDLADIVANKWK

SEQ ID NO: 280024 - protein, 99 aa, Glycine max
  unsure (1)..(99): unsure at all Xaa locations
  Clone ID: PAT_MRT3847_94886C.1.pep
HADHANGGVCETPWRSRHHHHDHHRRLKKTPIRNIAIRRPEEATHPDTXKAALAENIYTLIFTFARSGSGIAYNKLTDNGAGTTAGLICAFIDHAYALF

SEQ ID NO: 280025 - protein, 187 aa, Glycine max
  unsure (1)..(187): unsure at all Xaa locations
  Clone ID: PAT_MRT3847_94887C.1.pep
RRRKPIIVLGGKEFIDADESDLPDKISEGPLKPLPAETPDSEIVAPLDNEVVPLAVETILAWERTRKGAKRLMRLYNVSVCGYCPEIHVGSQDHKAXNCGAHKHQQCNGXHGXQSVILDDLIPPRFVWHVPDVNEPLERELRNFYGQAPXVVDMCIQVGAALLEQYKSPMRLDVGIPSTLKEADMVV

SEQ ID NO: 280026 - protein, 103 aa, Glycine max
  unsure (1)..(103): unsure at all Xaa locations
  Clone ID: PAT_MRT3847_94888C.1.pep
MGNFVLQFPNTLMSFTVSASFNFNGTPPDGYGSRLGGGGGPVILQLPLDKIRRSLMRTRSNDQNICLELMDRIMEIDLXVPIDVLEVAGLYYGISGCHRYEAY

SEQ ID NO: 280027 - protein, 105 aa, Glycine max
  Clone ID: PAT_MRT3847_94889C.1.pep
QNTNFTCVLRDEIPLQPSSQSDSEEIENLINARVHQSVPSARRVRPSRTSIPVTVCVTNGPSRFIASNCTPLTLLHKTSVAAVTRSPWGAHPGISITGFGLAPKT

SEQ ID NO: 280028 - protein, 177 aa, Glycine max
  Clone ID: PAT_MRT3847_9488C.1.pep
MENWRGARMMVVASAVAAMGWLSVVAMGSPVLHKVGGSKGWINQDVNYTEWSAQEHIYVGDWLIFKFDKRYFNVLEVNKTSYENCIDRDFIKNITRGGRDVVQMTDARTYYYLSGGGYCFHGMRVAVQVQQEDQDPALAMAAPPAPSPVAYGSSSPLPSVCTCIWIIIVANVVVFVN

SEQ ID NO: 280029 - protein, 240 aa, Glycine max
  Clone ID: PAT_MRT3847_94890C.1.pep
RIGEGVNEVLSIPIEEGNSLSVLMGKENGEIVETDSEEIVEIEMDVNKMHDLPVEEDGTKSVLKDRMNAYIRSDVRNALETIERVISVVRECGFHSLGSTLNSAGEEFHCMENGGTVDSDSAKVIEVCLKNEVSVKVSSSNMLEENLEEPGTIQSFRHTGTNANKEVNYKKVVPASPEQNLSRPMEANQADSYSLKNGTTLDQTIYDNKQLNSDAVQDMSSDDLKKSTREIKYRYCCFMH

SEQ ID NO: 280030 - protein, 54 aa, Glycine max
  Clone ID: PAT_MRT3847_94891C.1.pep
GIPTMPIPLAYSKDLIGIPGTYIEFLPLTNGTLLTGQENPGPDEIIGEIKGTLF

SEQ ID NO: 280031 - protein, 78 aa, Glycine max
  Clone ID: PAT_MRT3847_94892C.1.pep
FKACGFTMKGLQPLVSGGRFFSWGSGAFSRGREWVQFIYGWHSSGFLIARGKCPVTRCPNLGAVGPPDKQCRLFFFYV

SEQ ID NO: 280032 - protein, 64 aa, Glycine max
  unsure (1)..(64): unsure at all Xaa locations
  Clone ID: PAT_MRT3847_94893C.1.pep
SPQWXKTXXNPKKXGXNPEXEXXFGXMXXGWXYHLSXMSHPSGRTKCHHXQLQVVTLVLPEDXX

SEQ ID NO: 280033 - protein, 69 aa, Glycine max
  Clone ID: PAT_MRT3847_94894C.1.pep
IPSGVILDGCRGSSTICITFRFSFAHWWILISPSKYRLVYCKHLQCHIRSIFDLKWSHQNSQCFCNGEN

SEQ ID NO: 280034 - protein, 70 aa, Glycine max
  Clone ID: PAT_MRT3847_94895C.1.pep
FMKASVLLGGSVQVSYVRLNRISMCRCRGVHVLCSSKKERNVYRWSVQDSCLIVKGVSPVDVPVHSVSIG

SEQ ID NO: 280035 - protein, 95 aa, Glycine max
  Clone ID: PAT_MRT3847_94896C.1.pep
AVTIMESLGSRLYVNIGLVWAHHGTTSFCECISLTRASAMQIETLERPLIVAMPVSIECSELQGFKSEYTEPRMDHVLHGRSKETVPRLELQQNY

SEQ ID NO: 280036 - protein, 81 aa, Glycine max
  Clone ID: PAT_MRT3847_94897C.1.pep
NFEIGPLSPRGDFPPPPFFNPPQGNLPLLKRIFVFRGAPRGLKFSAIFFRLFSGGPFKVFVLENFFPGLFFLAFQILGAGS

SEQ ID NO: 280037 - protein, 82 aa, Glycine max
  unsure (1)..(82): unsure at all Xaa locations
  Clone ID: PAT_MRT3847_94898C.1.pep
SXARVRXLGIRLEEGKKLKEKLKPLMKVVESEDYSQQLEIVCLIDPGCFREIDELIKKETKGKGSLEVLSLKDVEEGDEKFE

SEQ ID NO: 280038 - protein, 104 aa, Glycine max
  Clone ID: PAT_MRT3847_94899C.1.pep
HWLSCVGWHKTLLKHDSTSTLGETDAQRMAATTHGTLRARGLFCHHPDHLARGPLKMEQRIPWRLVIQQPRDAPKHILSVGLIAQVDRVITVAQIEDRMLDKVS

SEQ ID NO: 280039 - protein, 464 aa, Glycine max
  Clone ID: PAT_MRT3847_9489C.1.pep
VYIVSSKLISINLFIYLRSSSGCEKTTEGEPKTMATCSLISTLFPSPSSSSFSLSRSSSNTTKPTTIHLSKSLHLQTPILFLLRPPNPKPTLPIIPLFPKLTIPNSLLLLCTSLALSFTLLLSPADSAAAFVVTSPRKLQSDELATVRLFQENTPSVVYITNLAVKQDAFTLDVLEVPQGSGSGFVWDKEGHIVTNYHVIRGASDLKVTLADQSTYDANVVGFDQDKDVAVLRVDAPKDKLRPIPIGVSADLLVGQKVYAIGNPFGLDHTLTTGVISGLRREISSAATGRPIQDVIQTDAAINPGNSGGPLLDSSGNLIGINTAIYSPSGASSGVGFSIPVDTVNGIVDQLVKFGKVTRPILGIKFAPDQSVEQLGVSGVLVLDAPANGPAGKAGLQSTKRDSYGRLILGDIITSVNDKKVTNGSDLYRILDQCKVGDKVIVEVLRGDHKEKIPVILEPKPDES

SEQ ID NO: 280040 - protein, 187 aa, Glycine max
  Clone ID: PAT_MRT3847_948C.1.pep
MASAKWLFKIITFPCITPPRPKSLPAIDGDTTTPPPLIGPSGPKDDDERLKDVFDHLDIDKDGKISSSELMDYFASVGESLSHKVAERVINEFDSDGDELLDFGDFEKLMKQEDSEELEDVLRSAFEMFEVEKGCGCITPKGLQQMLRQLGDVKSHDECAAMIQAFDLDGNGFLDFNEFQQMMSPAS

SEQ ID NO: 280041 - protein, 83 aa, Glycine max
  unsure (1)..(83): unsure at all Xaa locations
  Clone ID: PAT_MRT3847_94900C.1.pep
HAHARNLAIRLKHLNIPTFLFDRGSXACFADPNLPVAIFRPAYLEDTSNQACLSXLANAKYTFPRDDHGNLPYLCMDLIYHYT

SEQ ID NO: 280042 - protein, 133 aa, Glycine max
  Clone ID: PAT_MRT3847_94901C.1.pep
MFHARSVHPAALLTYVPSGLMALPGPCLPPTRPGPRAPHVRGGTRPGAERAEHGIYKGNNFVGECRNQQGHGGESSSSGLNPIEDAWKVVVAKSPQLHVDQKAEEFISKFREDMRLQKERSMLEFQEMLARST

SEQ ID NO: 280043 - protein, 52 aa, Glycine max
  Clone ID: PAT_MRT3847_94902C.1.pep
KNSQVESPTVTTYPSAEGRRETHGCVFQGRKIHGVATNIYLRKTLEKPKSGL

SEQ ID NO: 280044 - protein, 57 aa, Glycine max
  Clone ID: PAT_MRT3847_94903C.1.pep
GRHNSKNSLSNNFRHKHSNKIRIPPTILFKQLIDFQLRIDQEHYEPCSSILYLYPPI

SEQ ID NO: 280045 - protein, 154 aa, Glycine max
  Clone ID: PAT_MRT3847_94904C.1.pep
ELGIRLELQSCLIFHLRGLLLSLYTRQSRTCPQKWLPVKPDLQCEPGPGSWYSDYTSASVSVPDQKIAEHGFNCRNYGQNLVKGSENPHRYYKCTHANCSVNKTVEKTLEGQMTEVVYKGHHNHPKLQSTRRTNSQSMNKPSSSCTNSWISDQS

SEQ ID NO: 280046 - protein, 84 aa, Glycine max
  unsure (1)..(84): unsure at all Xaa locations
  Clone ID: PAT_MRT3847_94905C.1.pep
LCXWVXLXXRXXXNXEFXRXXXKFIPKGXXXDXVAHXQVLTAXNNAIXPLSKXEXSQTXXIPXXXVXNLXPXEXRXEFRAYYXC

SEQ ID NO: 280047 - protein, 62 aa, Glycine max
  Clone ID: PAT_MRT3847_94906C.1.pep
SYHLDLGNYQSDYKISIMLVFEFLYCTYALYIEPKNKILMKLLNIIHLVHLQIYLLHKKPTR

SEQ ID NO: 280048 - protein, 70 aa, Glycine max
  Clone ID: PAT_MRT3847_94907C.1.pep
VDVKYYLIHCLVQCLVDYFVSDGVYPGDKPGLTFAITIQIAVMFVVVILAGVTAGATNSPYTSDDTELDL

SEQ ID NO: 280049 - protein, 175 aa, Glycine max
  Clone ID: PAT_MRT3847_94908C.1.pep
MGCIDSGKECHAQATKNGVDSVLPVQNSLIHMYACYGDVQLARVLFDGMLSRDLVSRNSIIDGIMMVGELNAAHRLLNEMPDRNLVTWNVMISGYLKGRNPGYAMKLFREMGRLGLRGNARTMVCVATACVLFPLFDAWVFPQQLHLRATRCFVCQNGLHWFWEGVSCSGHEEWG

SEQ ID NO: 280050 - protein, 82 aa, Glycine max
  Clone ID: PAT_MRT3847_94909C.1.pep
LLYQLTIPIHYRHPKHASGVFSLRPVVFTLTLSASSAHCHYFSFKAPPPPPKEGGRLTVLTGNLPPNPPNDRSERQYQCMIG

SEQ ID NO: 280051 - protein, 45 aa, Glycine max
  unsure (1)..(45): unsure at all Xaa locations
  Clone ID: PAT_MRT3847_9490C.1.pep
MTLALPIMLSCWNIXXFVMDVXXXXXDGKCXCXTXCTCTDCXCGX

SEQ ID NO: 280052 - protein, 96 aa, Glycine max
  Clone ID: PAT_MRT3847_94910C.1.pep
SSTAFGRPPSKKQKERPILTRVGKQLTVSSPDFGGHPDDGLGALYKTAKAASNASIRACSGPFWKKMESLFGSISLAKTSYLKQQLNTTEVFYKSV

SEQ ID NO: 280053 - protein, 138 aa, Glycine max
  Clone ID: PAT_MRT3847_94911C.1.pep
MATAMDWLPWSLLLFSLMCETSAFYVPGVAPINFHQNDPVEIKAVKLTSSRTQLPYEYYSLPFCQPSKITYKAENLGEVLRGDRIVNTPFQVLMNSEKKCEVLCSQSNKPVTLTVEQSRLVAERITEDYYVHLGGSTS

SEQ ID NO: 280054 - protein, 72 aa, Glycine max
  Clone ID: PAT_MRT3847_94912C.1.pep
TSYPNLTGVSIEAWQLQGNSDPCTIPLQALGHELNSLRVLWVPATRWLRGSERLQRRFLDGGPHPGHGQRRD

SEQ ID NO: 280055 - protein, 89 aa, Glycine max
  unsure (1)..(89): unsure at all Xaa locations
  Clone ID: PAT_MRT3847_94913C.1.pep
EQLXIVKSLVICHLLIQVSPSLQSLPPAGSARDRVQAIRRNRGTAGHRLAIVRTFAVEGSPETEYPAESIEKSEARILELRRKRSAAGG

SEQ ID NO: 280056 - protein, 47 aa, Glycine max
  Clone ID: PAT_MRT3847_94914C.1.pep
HSRFLMLAAGLHISQLLLKQQMLAFFSARPFSHHLVNQCNSQASFIR

SEQ ID NO: 280057 - protein, 111 aa, Glycine max
  Clone ID: PAT_MRT3847_94915C.1.pep
IKQRRRDRKQENSGGGNGGRNKHRTKHGKKRAETEEEKKEETGHKGSPAEGQATRAHETEKQVAKESPKEQTPGEDKKHPTKGNKRGKTMNRRQRRGGEPKHPTEGKWQEG

SEQ ID NO: 280058 - protein, 54 aa, Glycine max
  unsure (1)..(54): unsure at all Xaa locations
  Clone ID: PAT_MRT3847_94916C.1.pep
XPXXXXEXXQXHXXCXWYLXTPXCLAXXXXXXXSLEEXXXXXSXXIPSXRXXXX

SEQ ID NO: 280059 - protein, 71 aa, Glycine max
  Clone ID: PAT_MRT3847_94917C.1.pep
NSPRDYPYLSSSHSLSLFLSIYSSPTLGRLLEYLAGDCSIIHIQSLFIQQIQCNSPFYLVLLTQFVQLINY

SEQ ID NO: 280060 - protein, 58 aa, Glycine max
  unsure (1)..(58): unsure at all Xaa locations
  Clone ID: PAT_MRT3847_94918C.1.pep
XRXXARNSXLGSSXSGRXLXXXXXRELXPDRXLQXXQFXPXXXXXXXWXDHGHXCPXX

SEQ ID NO: 280061 - protein, 113 aa, Glycine max
  Clone ID: PAT_MRT3847_94919C.1.pep
MGLFSCTKLLPIVVLFSLLFTSYATNSAENNFVHCLVNHSEPSHPISAAIFTQNSSSFSSVLQAYIRNLRFNTSTTRKPFLIVTPFHVSHVQASIVCAKKHNLLMKIRSGGHD

SEQ ID NO: 280062 - protein, 81 aa, Glycine max
  Clone ID: PAT_MRT3847_9491C.1.pep
TTKKIPPPLGKGKNIVFLTRVDPFPEPSRLVLLGVKNEIWGSNPPILMLPRFLRTCRGPKNWVKRGPLALVTRNVIFYPLK

SEQ ID NO: 280063 - protein, 109 aa, Glycine max
  Clone ID: PAT_MRT3847_94920C.1.pep
ITQSRTTFDNLVAIRFASRSSITAKNGAFQRSGILVADPKKKVQRFEHTCEKWRRQIGFGITREEDSERDERRIFRRRNFALKTSQSDRKRAAEPANRRGRKKKHEGKT

SEQ ID NO: 280064 - protein, 93 aa, Glycine max
  unsure (1)..(93): unsure at all Xaa locations
  Clone ID: PAT_MRT3847_94921C.1.pep
SLHEAAYXAKELLXWVALNSHLGTHLELVLPVLTXLXVFLFXNFXLFSXXXISSWGGPSLFFPLSSPSFFXXFPSXSPFLSFXXILLFLFLFF

SEQ ID NO: 280065 - protein, 84 aa, Glycine max
  Clone ID: PAT_MRT3847_94922C.1.pep
KLGPEGNTPMTWHVPVGGLPYTQKTQSVAYCFCSVRRVHILTPVLGDLFRSNDITVKLQADYYADTVTLNYIYVYGSDCDDTDL

SEQ ID NO: 280066 - protein, 79 aa, Glycine max
  unsure (1)..(79): unsure at all Xaa locations
  Clone ID: PAT_MRT3847_94923C.1.pep
XYXPXAAAXXCLIYLXXYXHXXXXXDXXXXXXXXFXRXXFXXSLXXXXXXXXXIPXXSYXHXXXXXXLXFXXTXTIXSP

SEQ ID NO: 280067 - protein, 744 aa, Glycine max
  Clone ID: PAT_MRT3847_94924C.1.pep
ACDLVSKMETHGVDRWLPPPVLELLVTPSEVRAFWAARGQVATGSALVPRGRWADGIILGALDPCPVCPGLLRFSGPVPPGQGCFPVWASCPFSTWVPSRLPRMWRVPDDSKSQYLKKWFKSQKGKKPVRILPLPSPRKSAESQMIASQHHHSSNSGNLRDLKVAICGLPNDSIAEWKRKIDGIGGVFHAKVNKDTNCLVVVGSLNDEAEMRKARRMKKPIVREDYLIDCIERKKRLPFDMYKVEMIGETSSMVTIKVKGRSAVHEASGLQDSGHILEEGKSIYNTTLNMSDLSTGTNSYYILQIIEEDKGSDCFVFRKWGRVGNDKIGGTKLEEMSKSDAICEFKRLFYEKTGNPWEAWEQKTIQKQPGRFFPLDIDYGVNKQVPKNKKNDADSKLPPPLIELMKMLFNVETYRAAMMEFEINMSEMPLGKLSKSNIQKGFEALTEIQNLLKISNPDPSVKESLLINASNRFFTMIPSVHPHIIRDEDDFKSPRVRLEALQDIEIASRLVGFDANNDDSIDDNYKKLHCDISPLPHDSEEFCLIEKFLQNTHAPTHTDWSLELEEVFSLEREGESDKFAPYRDKLGNRMLLWHGSRLTNFVGILNQGLRIAPPEAPATGYMFGKGVYFADLVSKSAQYCFTDKKNPVGLMLLSEVALGNVYELKKAKYMDKPPEGKHSTKGLGKKMPQESEYVKWRGNVTVPCGKPVPSNVKSSELMYNEYIVYNTAQVKMQFLLKVRFHHKR

SEQ ID NO: 280068 - protein, 90 aa, Glycine max
  unsure (1)..(90): unsure at all Xaa locations
  Clone ID: PAT_MRT3847_94925C.1.pep
MSIELSKVLSLSLQVLSLLSPKTDPAHDHQRRRQHRCPNSTTTGYRCCNHLYVGWVHGGGVQEGFLRQTPGRHASQGERXGRKSVPRPCA

SEQ ID NO: 280069 - protein, 140 aa, Glycine max
  unsure (1)..(140): unsure at all Xaa locations
  Clone ID: PAT_MRT3847_94926C.1.pep
ERWKGRIHDEYLGASIWPRRQSIGTVAHIQDXSEDYHQPMPAPFFDPTYLTTPRGGGGGVAKLXXTFLFLYITDLTDMVVSQAKSNCNTVGMXGIVWAFGGMIFALVXYCTAGISGGHINPAMTFGLFVARKLSLSRAIF

SEQ ID NO: 280070 - protein, 305 aa, Glycine max
  Clone ID: PAT_MRT3847_94927C.1.pep
MGNANGRDDVNGTPSGTEGEEEEEEEEEEEEEEDDGEEGGSDSVTDCMSSNPSHHAPSELMGHSPPASPRATQSPFMFTPQVPVVPLQKPDEMHAPSPSWMQTTSVYEDMYCELGIPTMITWSYDGKEVAVEGSWDNWKTRMPLQRSGKDFTIMKVLPSGVYQFRFIVDGQWRYAPDLPWAQDDAGDAYNILDLQDYVPEDIGSISSFEPPQSPDSSYDNLYLSSEDYAKEPPLVPPLLQMTLLNVPATNMKIQPPMSRPRHGVLNHLYAQKGKSSPSVVGLGTTHRFLAKYVTVVLYKSLQGKP

SEQ ID NO: 280071 - protein, 181 aa, Glycine max
  Clone ID: PAT_MRT3847_94928C.1.pep
EEKKKKEKKTGGWDNWKTRMALQRSGKDFTIMKVLPSGVYQFRFIVDGQWRYAPDLPWAQDDAGNAYNILDLQDYVPEDIGSISSFEPPQSPDSSYNNLQLSSEDYAKEPPLVPPYLQMTLLNVPSTNMEVQPLTSRPQHVVLNHLYMQKGKGSPSVVALGTTHRFVAKYVTVVLYKSLQR

SEQ ID NO: 280072 - protein, 110 aa, Glycine max
  Clone ID: PAT_MRT3847_94929C.1.pep
AGKSTNAAHLGWKSLIVKRQTVILRFDMFGLDRPRMMLKVYHPCDLNSQYGFPVGAVMKYNRILKYLTCQDHILSACKKLTTTCVLAHCGWRHNLLWQAFNLLCHGNWDT

SEQ ID NO: 280073 - protein, 243 aa, Glycine max
  unsure (1)..(243): unsure at all Xaa locations
  Clone ID: PAT_MRT3847_9492C.1.pep
SLITTIFNCRDLDILAAENTKATQLRKLLPHYIRRHVHTWLIYILASFLTAEIEYXRNQSNIQIFGLLYDGXYKFWTKHEKNLALTEEEKMEALINRGMTAAGLAKRAHEFEKHVAHESLKDQIPADDKWYSTKGXKFAKIMNLTQSVVGDLKLLTDGKLYEGKHIPVSNISAWENHVVQIPLMAQEEILSFNARDFITAMVRXNSKPXATAMPVGALETIFDSFSSPACHIVGAMLFGDTLY

SEQ ID NO: 280074 - protein, 94 aa, Glycine max
  Clone ID: PAT_MRT3847_94930C.1.pep
NEWLKMLLHFCEFRCLQTLLLSSDLGYFIMCYLLGTMLPCLLWRERNRWCLCGSLVICRDVKLKLLSSPSFNYNIYDYKCIKQGSCPVLDIIVK

SEQ ID NO: 280075 - protein, 104 aa, Glycine max
  Clone ID: PAT_MRT3847_94931C.1.pep
GTFKFTFTPYSGSRHELRCIYGLLSHCNIDREMQAMSSFTGRNDFRLHFAFFVGLQSTLPSLTRDTFHVFALRRVPHTDLTHHQHTTEVLTMNHLSQKFVKVLT

SEQ ID NO: 280076 - protein, 70 aa, Glycine max
  Clone ID: PAT_MRT3847_94932C.1.pep
KVQCRPRYADSRGALAGAISQMSMVVSWPCSSQEWTVVRDVSRQASYRSGAFFLKHPNGHGQPAFLAPRE

SEQ ID NO: 280077 - protein, 31 aa, Glycine max
  Clone ID: PAT_MRT3847_94933C.1.pep
GHLNPALHNQTSSNWNRINLKWPRVFKYISA

SEQ ID NO: 280078 - protein, 199 aa, Glycine max
  Clone ID: PAT_MRT3847_94934C.1.pep
PPNPKPPPPPPASAPPPPPPPSPPIEELCTIRDLDNGKEFVVNELENLREVATGRQLTMEEFEMTVGHSPIVQELMRRQNVEEANVDSNAGGSKAKKKGTGWLKSIKSVASSVAGYRDRRSSDERDTSSEKGGRRSSSATDDSQEGGGAFHGSERVRVKQYGKSCKEVTALYKSQEIQAHSGSIWSIIVSLDGKYLASA

SEQ ID NO: 280079 - protein, 38 aa, Glycine max
  Clone ID: PAT_MRT3847_94935C.1.pep
VNVILVPGNLYLISVDWQAVKVLSFYMWGFPCNEYLGL

SEQ ID NO: 280080 - protein, 139 aa, Glycine max
  unsure (1)..(139): unsure at all Xaa locations
  Clone ID: PAT_MRT3847_94936C.1.pep
SNLIKSSVDDVETPKGSMSDLKISQPKIALRKYTGGGTIPRSDLLAKFLTEGIFRARVDLQRSHRIKGMIXMAATVGIPENTGIALSWAMNSSFRGRASSDIHTICSQDXTLWHPACTRAMTMXYNANPCADAWSLEFL

SEQ ID NO: 280081 - protein, 74 aa, Glycine max
  Clone ID: PAT_MRT3847_94937C.1.pep
RTKKKKKKIPGSALLWERGNPEVRPKEKSVLKVKKKGVAVHKAVHQVFSEKGIEVPNGRPQSCGKTTHLVQPQL

SEQ ID NO: 280082 - protein, 90 aa, Glycine max
  unsure (1)..(90): unsure at all Xaa locations
  Clone ID: PAT_MRT3847_94938C.1.pep
KPLVLEIPSETESQANVVVKIEEAPLSPSENDHPEFIVSVKEEPVXDDLVPELGISNLLSSSHCPKPSSCLLDAYSDCGYGGSLSPFSDM

SEQ ID NO: 280083 - protein, 66 aa, Glycine max
  Clone ID: PAT_MRT3847_94939C.1.pep
ILILKFYPKINSTTPKNFLGILKSFLTIALTKFHLTHTKICAKLKIFYPLYISIIFDPLIILSQTP

SEQ ID NO: 280084 - protein, 314 aa, Glycine max
  unsure (1)..(314): unsure at all Xaa locations
  Clone ID: PAT_MRT3847_9493C.1.pep
PGLPGSIHSCGLVSRAHELEKHGAHXESLKAQIPAVDKLNSTKVNKLAKIMNLRQSVVGDLKLLTDGKLDEGKHIPVSNISAGENHVLQIPLMAQEEILSSIASDFRTAMVSKNSTPQATAMHVGAIEIIIDSFASPDCNIAGAMLVVDTYHTNPVNAVRSIFVAPFRGGRPIRVVTFSNTIVQIEPDMNSRFQLLSTTTNGDFVQGKDLSMVKVNVACAAVGLTSSYTPTSLLESGLQKDRGLIVEYFGRMFYXVAHNVNTAPXKDLLEGNFSFDLKSRSNLEKFSXTKAQFVCVKTFKFXIIGAGSHSLEEF

SEQ ID NO: 280085 - protein, 209 aa, Glycine max
  Clone ID: PAT_MRT3847_94940C.1.pep
HASGKDSSVLSCLAQCSSNLKTIVSFGSVSTTQKKEAEGHGASCFSWGEFLQLGCLDWDLPSKKKTDICTIMYTSGTTGDPKGVVIKNEAFMAEVLSVDHIIMLTDRVAGEDDVYFSFLPLAHVYDQIMETYCISKGSSIGFWQGDVRFLLEDIQELKPTIFWSSLEFDPYLMQVSKAVFFCRTTAEYIFSALTLQVKISGERVFRTQS

SEQ ID NO: 280086 - protein, 93 aa, Glycine max
  unsure (1)..(93): unsure at all Xaa locations
  Clone ID: PAT_MRT3847_94941C.1.pep
QXSSGTRFQIKIMAAHLPRILVGGSYLDNLTLKVNSRSLSTKNSRFRRLSTILRNRVKVSMRLKNHQQPDNTAIYGYIIYNAAKTWCNSHPYM

SEQ ID NO: 280087 - protein, 40 aa, Glycine max
  Clone ID: PAT_MRT3847_94942C.1.pep
VIMCSADGKIFRPKMKVKVNPKLLQLSRSGLQNVEGKWIH

SEQ ID NO: 280088 - protein, 117 aa, Glycine max
  Clone ID: PAT_MRT3847_94943C.1.pep
MGTSTASRVSLTANGKSSHGSRAAEHRSASECLNESTTWAMRKARVITHDGFTPFVIVNDMNSDPKPPLSSASQPRLIHLFNSSIINATSFSLSSYFAPIHTYATFVMDQFSLAHRT

SEQ ID NO: 280089 - protein, 65 aa, Glycine max
  Clone ID: PAT_MRT3847_94944C.1.pep
GSRSNAFYAATQSPRKASGARQCFSQYHTRVDHCLYCPRSGIQPPLTPQACIIQPDALKHPTRLL

SEQ ID NO: 280090 - protein, 218 aa, Glycine max
  unsure (1)..(218): unsure at all Xaa locations
  Clone ID: PAT_MRT3847_94945C.1.pep
XTMSEVQMXXVALGXXLSQQRFVXVXXXXCEGDASGSFFEVSNGGDVALNYLPEGFVKRTEAVGVVVPMWAPQAEILGHPATGGFVTHCGWNSVLESVLNGVPMVAWPLYAEQKMNAFMLSEELGVAVRVAEEGGVVRREQVAELVRRVMVDEEGFGMRKKVKELKVSGEKALSKVGSSHHWLCQMSKDCEAHVQGSEAKVSSAYTTTTAVLSDVVRS

SEQ ID NO: 280091 - protein, 101 aa, Glycine max
  Clone ID: PAT_MRT3847_94946C.1.pep
KPQRRKTLGSHKHYPIARNQSMAFIFRFPLVPKGLIVVRERASGSARCHQHNRLPFMASSYHCHSSIAFFFFFFFFRLQYNCIYSLSLKLELILEDIYSRV

SEQ ID NO: 280092 - protein, 77 aa, Glycine max
  unsure (1)..(77): unsure at all Xaa locations
  Clone ID: PAT_MRT3847_94947C.1.pep
TSFXPPSPPLPKTFPSXXQHNKQXXQTLSSHPXXCSPSSLXLFNXTXXLTLXXXXSLIXXEXPFSSXTTXFQSXPFR

SEQ ID NO: 280093 - protein, 63 aa, Glycine max
  Clone ID: PAT_MRT3847_94948C.1.pep
GHTTGLNQIPCYNKGASPPHDYSNMPCLAIRNNHPFSPPHESNTGGFTTNLPPFLLGGLQQFP

SEQ ID NO: 280094 - protein, 71 aa, Glycine max
  unsure (1)..(71): unsure at all Xaa locations
  Clone ID: PAT_MRT3847_94949C.1.pep
SPTXNXNYQXXICLTKLHVXNKIIGKXXINFVXLXSCXHXFITLXDFXFAYNGNKFFSSXHRMLXFEWDKN

SEQ ID NO: 280095 - protein, 330 aa, Glycine max
  unsure (1)..(330): unsure at all Xaa locations
  Clone ID: PAT_MRT3847_9494C.1.pep
SPRPELPGPPTRTSLRPKISQSKIALPKNTVGGTILRSDLLANLPTEGNFRASVDXPRTHRIKGMIKMVATVGIPENTGIALACAMNSSFRGRASSDIYTICSQDCESWNPACTKAMTMSLNPNPCTVAGRLEILKRSGMQRSSIRATWRTATPMQDVQVTIDWFIPSQECVPKTYSVVNPQNPLVLNRRMGKLTLPQGTSRSVKIMPLSIRGGAGAKNAILMNMPNAVLSMGRYSVGDLVFEVAKMTSPYIKCTVSLFIAFGNWADDTINCEAFAHMLEHVGXIQEKVVXKFAQDECLTAWSTDVRTATTLMADGCPYLYAVVHDTSLS

SEQ ID NO: 280096 - protein, 97 aa, Glycine max
  unsure (1)..(97): unsure at all Xaa locations
  Clone ID: PAT_MRT3847_94950C.1.pep
SADHGRAVRSXESSFQGSAPSAVQARTPAGAHPQRAAGPTARWAPDQTRLRAQSLRPKQPNSAASQPPPATKLRGASAKVCEDLRTGQIEPGLRKAM

SEQ ID NO: 280097 - protein, 123 aa, Glycine max
  Clone ID: PAT_MRT3847_94951C.1.pep
YVNCFIVYDFDEVCQFAETISKFGSGMFLLVQVMLLLDFVHGWNDKWVGYDEQFWYIALFVVSLVCYVATFAFSGVLFHFFTPSGQDCGLNVFFITMTMILAFVFAIVALHPAVSLLFDFHCS

SEQ ID NO: 280098 - protein, 137 aa, Glycine max
  Clone ID: PAT_MRT3847_94952C.1.pep
YNIQLPFLLSYCFEFGITSRDQIIVCIVYGFDEVCQFAETISKFGSGMFLLVQVMLLLDFVHGWNDKWVGFDEQFWYIALFVVSLVCYVATFAFSGVLFHFFTPSGHDCGLNVFFITMTLILAFIFAIVALHPAGRL

SEQ ID NO: 280099 - protein, 57 aa, Glycine max
  Clone ID: PAT_MRT3847_94953C.1.pep
GISLNKGWASDKNNVRNPPSTNEENIVPPRLKNLGFYCKFNRKFSYNVSDIMPMRGP

SEQ ID NO: 280100 - protein, 86 aa, Glycine max
  Clone ID: PAT_MRT3847_94954C.1.pep
SAPETSSRVTPWGGVRNASAEGLKDCPPGESGCSRGGESPGPSGCFQGGAGRSAAFAHRGYSTEQDATAVGSEIWRRVRYRCTRGR

SEQ ID NO: 280101 - protein, 36 aa, Glycine max
  Clone ID: PAT_MRT3847_94955C.1.pep
RVCINIDFFGKSMLTYHTLTSVFQKSMLTNDVNIGF

SEQ ID NO: 280102 - protein, 70 aa, Glycine max
  Clone ID: PAT_MRT3847_94956C.1.pep
KKISLYPIFSNLVCYLLSPVKSVPLLIPPSTRQLPNFNLTLIHHTPCDNFLSLFELFLQTHNNNFLELVS

SEQ ID NO: 280103 - protein, 139 aa, Glycine max
  Clone ID: PAT_MRT3847_94957C.1.pep
QLVKSIISDPTPPLPGNPSRPFVNLINSLLVKDPAERIQWPELCGHAFWRTKFTLLPLPAQPAFDDMIELHAKPCLSERNGDKSSHNRTPTKYREKDVKGAWRKDENSVLGSRGIETPARATPIGHRTQTKGSGRLHEV

SEQ ID NO: 280104 - protein, 101 aa, Glycine max
  Clone ID: PAT_MRT3847_94958C.1.pep
CSPSRTSIVKKGVKHFGKAFTRDLAGRGSLHCLALKTARDMLRLCSNQPSTLLKDEMNVDIGSNNTGELSEPSSWPADGFRSQSSSPRFHGTSHRTNTFRN

SEQ ID NO: 280105 - protein, 77 aa, Glycine max
  Clone ID: PAT_MRT3847_94959C.1.pep
RQEPDFLVSQRVLQVAERDGGMPSPCRSKCSNSHDGKRQAWDADAHHYCTQSHEYVTVKGFKIRTDNCDSLSDTNCT

SEQ ID NO: 280106 - protein, 96 aa, Glycine max
  Clone ID: PAT_MRT3847_9495C.1.pep
IASLATEVFFDCSCLFDFILSPLNVHLILPYYHVAHEHQPPVDPPHHPSLTASNPTNVLDTIDRVESDTGPSNSTRASAPHMWSCSSPSNSVFLEP

SEQ ID NO: 280107 - protein, 53 aa, Glycine max
  Clone ID: PAT_MRT3847_94960C.1.pep
FLFVYVTFNAPLPFGFFFPIYFIAIASIRLILLVMVPVTSSPASSSVVQIQSF

SEQ ID NO: 280108 - protein, 117 aa, Glycine max
  Clone ID: PAT_MRT3847_94961C.1.pep
FQVSSTVSLLLHINGTYRAHWAERLGFCKIAGPPLAFRCIKSNGGLVPQTLAGITRIYPILYMERLSSGRSVVMSERMENKMMELYNQRRSAVVDGIISEYQKERPHIYYDSDSEGA

SEQ ID NO: 280109 - protein, 81 aa, Glycine max
  Clone ID: PAT_MRT3847_94962C.1.pep
LPVRTPHRGGLGHFSFFVSGFQVGVLVYYFIGGGFSPPRSVEEFCLKARVGVLVHPPGHVSFFARFFCGLGEEKRGFPKAE

SEQ ID NO: 280110 - protein, 63 aa, Glycine max
  Clone ID: PAT_MRT3847_94963C.1.pep
LRTLQISSSKEDPGEGLCSSRGFRYRDLTHPWSLVHMPSPTLHAYSCKIEARHPYEVGRRRTY

SEQ ID NO: 280111 - protein, 94 aa, Glycine max
  Clone ID: PAT_MRT3847_94964C.1.pep
WKVHDAMPELLQQFCLLKSKQKAQLEWDRRQAEIANYTDGHWQIKVKDRRLKKCIDNLCNWKSMLRHWGETNWTDDEFYTPTPPTVTTASLSAL

SEQ ID NO: 280112 - protein, 207 aa, Glycine max
  unsure (1)..(207): unsure at all Xaa locations
  Clone ID: PAT_MRT3847_94965C.1.pep
FTHIIKKGEPTFSVLVSRFLLGKAFPIPVYLSLLPIIGGGALAAVTKLNFNMIGFTGAMISNLEFVYCNIFSKKGMKGMSISGMNNYSCFSIMLLSILTTFAIVVEDPKVWAAGWQTNVSQIGPNFVWWVAAQSVFYHLYNQVPYTSLDQISPLTFSIGNTMKRILVIVSSILIFPTLVXPINVLGIAIAILGTFLYSQVHSPLPLN

SEQ ID NO: 280113 - protein, 66 aa, Glycine max
  Clone ID: PAT_MRT3847_94966C.1.pep
SETLSTKRVSILGIQPYSNQKSPPAFLETFLHGGGTTKGRATFLRFCLYGPTEGLLTGYPLAPHAL

SEQ ID NO: 280114 - protein, 81 aa, Glycine max
  Clone ID: PAT_MRT3847_94967C.1.pep
IACEDTFSFLAHHGQVFFQPDAISSKNLERSQLLSPFYINFVSVRNLELLGAFRCLKLAWISMVMPEEILRSFSVSQLLGQ

SEQ ID NO: 280115 - protein, 145 aa, Glycine max
  Clone ID: PAT_MRT3847_94968C.1.pep
RPTRPYGFEKTTRGLKQKEQILQQHLLRVMRIVEALEEKGCRIPLTKGEAELAEKLATITRKLKGSGAELSRRVQNLLIVSRVKANSNGFGSSVYLPGSTKIHEQSLGDLQEVLQQQLEAIARLGNVLKRDIRDMEIMMTEDTKN

SEQ ID NO: 280116 - protein, 130 aa, Glycine max
  Clone ID: PAT_MRT3847_94969C.1.pep
IAHSRWLLPRSDRTLSWWLRPSFSVDSNRTLSSYKSHEEVKRFRFKVIPNWDDIIDLCAKDRATGLGKENALDVDDIMSKEANEEEAIHNVNIDLEGSSSASRKNIRPSKSGEKEGIISSMKEVAESLKR

SEQ ID NO: 280117 - protein, 120 aa, Glycine max
  Clone ID: PAT_MRT3847_9496C.1.pep
RPLRRRGPELVYWARGTRSMKTLHFLLVSFFAFQALLLGSSPTEATRLRTLSLGYSSSTGATLKKVSLRPPTHPRRHSPPPPTPGYSPEPGPGRTRRSPPTPRPFIVVPANNSDPSAASA

SEQ ID NO: 280118 - protein, 44 aa, Glycine max
  Clone ID: PAT_MRT3847_94970C.1.pep
SPVLLTVRTIHMATLSTRMRESAEIITFPDMCCYSFWYLAGFRI

SEQ ID NO: 280119 - protein, 117 aa, Glycine max
  Clone ID: PAT_MRT3847_94971C.1.pep
GTRKLLSPHGFLKPEHARFQGEHLGSSFHSGRVQDPGPGIVLGLYALEWARSSSYSGLEVEIARWICTPQVRVEHGVPMLGGSTALRGPSRYHCCNNQARGGPSLLRMKNQQLDISF

SEQ ID NO: 280120 - protein, 77 aa, Glycine max
  Clone ID: PAT_MRT3847_94972C.1.pep
TTAPPFFDRSFLNFTDNNNQQSQGEGGVLTRQTPPHTSNMWMAQPSRQQDREPHPQIYHTLAKKQSEQNVTQNQNTK

SEQ ID NO: 280121 - protein, 241 aa, Glycine max
  Clone ID: PAT_MRT3847_94973C.1.pep
MAESSACLVRSFSSPAEATCCDGNPILALGESISFGRFMTEGLDWEKWSTFSHNRYVEEAEKYSKPGSVAAKKAYFEAHYKRKAAERAAAVIQEANAQANGTFEAQVHEGNCADSSFGTSSNVANVVAANEQLDNETANYQVVECADTDQHKCDAGQSDLDISNVKGAEDVPHPRTDTDLNVESCTFVANSYSNQLHHVEDNTYIAVPAEEKTPDHGAVGQGVLTLSVKGRETLLRIINQN

SEQ ID NO: 280122 - protein, 147 aa, Glycine max
  unsure (1)..(147): unsure at all Xaa locations
  Clone ID: PAT_MRT3847_94974C.1.pep
PLKDRENFVYIAILVYLAVRFXEMAESMRSAANIPIRTXTAEERNLLSVEHKTATSARTETXRILTCIEQKGETKGNXLYATWTKDSRQEGESKLSNIXDEVXMRASDEHFITAGVRGESTALNYXTTGEYDWDRAECKSSKEKKEA

SEQ ID NO: 280123 - protein, 277 aa, Glycine max
  unsure (1)..(277): unsure at all Xaa locations
  Clone ID: PAT_MRT3847_94975C.1.pep
MAALTSLSFSAVTHCSERKVTLSSTRFLASSSDIFGFRTDFSYHYVGVRASNSVSRIVVQCMSSATGVPRPTVSETKXNFLKAYKRPIPSIYNTAVVPLEXFSIYEKLMEGYPSDEDRDAIFQAYIKALKEDPEQYRIDARKLEEWARVQKPTSLVEFSSKEGEVEGILKDIAERAGGKGEFSYSRFFAVGLFRLLELANATEPTILDKLCVALNINKRSVDRDLDVYRILLSKLVQAKELLKEYIDREKKKRDERAEPQKANEAITTCLGQQLPGL

SEQ ID NO: 280124 - protein, 35 aa, Glycine max
  Clone ID: PAT_MRT3847_94976C.1.pep
KRLCFQFVGQFLGCTATSKVGLVLSSPLLSSTPPL

SEQ ID NO: 280125 - protein, 57 aa, Glycine max
  Clone ID: PAT_MRT3847_94977C.1.pep
LIHLNSFFFYYNISRNHYHFCNRTPVRGSIPEGGGSSYHFIISFHFLFHMKLCHDWD

SEQ ID NO: 280126 - protein, 35 aa, Glycine max
  Clone ID: PAT_MRT3847_94978C.1.pep
NACHNLYTHSSCNSKQSCFPKMQVIRLCNSAIAAI

SEQ ID NO: 280127 - protein, 55 aa, Glycine max
  Clone ID: PAT_MRT3847_94979C.1.pep
SLWSTSPQFKIYELLHRLTVSVIIAGNPNRVAALFLSDSAAVGAGTDLSIPIRRL

SEQ ID NO: 280128 - protein, 219 aa, Glycine max
  unsure (1)..(219): unsure at all Xaa locations
  Clone ID: PAT_MRT3847_9497C.1.pep
SGYAAVKRSDWGSLVQVSFMNVVPRTIVFLMPKAPCVLIRWLGKWTFPQGPSRGVKRWPFFLGGGAGPRNAFLMIMPNAVLSMWRYFVGDLVFEVSKMTSPYIKCSVFFFIVFGNLADDTINFEAFSHKLLQFGEIQEKVVLKFSQEEFFTAWSTXVLTATTLLADGCPYLYAMVHDSSLSTIPGDFXVIGAKLATINNLCAFGLNSWYXGSRFLGTIS

SEQ ID NO: 280129 - protein, 61 aa, Glycine max
  Clone ID: PAT_MRT3847_94980C.1.pep
CILKNIMMAGDFLLPNSTPFDRNRMSNGGDQDHLLLASMNMARVQCSTFSLCDGGGGNVGC

SEQ ID NO: 280130 - protein, 87 aa, Glycine max
  unsure (1)..(87): unsure at all Xaa locations
  Clone ID: PAT_MRT3847_94981C.1.pep
NLSIGVIVLFXGLSCLLHLRVFASYKNMPLSTWIVPYTHIHKIMILHAFLNLKYSNKRMTTKVIFLLFHLKIKRLLPFYSLSCLDGN

SEQ ID NO: 280131 - protein, 75 aa, Glycine max
  unsure (1)..(75): unsure at all Xaa locations
  Clone ID: PAT_MRT3847_94982C.1.pep
HCKLSHSQVTVLYPPYTIQHLHNPQYMLQXLSDIKLSDSYNIILISPHLIILKDSLSIPQFVNKTGLTLPLCIYI

SEQ ID NO: 280132 - protein, 78 aa, Glycine max
  Clone ID: PAT_MRT3847_94983C.1.pep
TPMLFFPGPKSACPKVRGHRMWLNQVASGKATACKDRCWAAYVNYLMQPEGLAHSIQGTLCCQSISRGGRNRQSFPAS

SEQ ID NO: 280133 - protein, 170 aa, Glycine max
  Clone ID: PAT_MRT3847_94984C.1.pep
MAKLEAKLGMIVDSVGQFFSGKDHLPYCDSDVVAGCEREVLEAEKQSSEEHMQDCLLRLSWALVHSKHPQDVHRGIAMLEASLPATKDPLQQREKLYLLAVGYYRNADYSRSRDLVDRCLALAPDWRQAVTLKKTIEDKITKDGVIGLGIAATAVGLIAGGIAAAVSRKK

SEQ ID NO: 280134 - protein, 82 aa, Glycine max
  Clone ID: PAT_MRT3847_94985C.1.pep
GVPPPGLFISAPSRKFLNEKSPVKLGPLACRIKGGPKCSPFQFMDVSKGYCLGFKMSDSFHDTKIWESPFWDLGGWSNNFVI

SEQ ID NO: 280135 - protein, 66 aa, Glycine max
  Clone ID: PAT_MRT3847_94986C.1.pep
ATNMIIVELSCVFENSTLRSMFEDEPCRHSPSQFCYGLVQNNLTSLLFELIQGPAIGPPSVVFSQP

SEQ ID NO: 280136 - protein, 229 aa, Glycine max
  Clone ID: PAT_MRT3847_94987C.1.pep
MKYVLISGGVVSGLGKGVTASSIGVVLKACGLRVTSIKIDPYLNIDAGTMSPFEHGEVFVLDDGGEVDLDLGNYERFLDVTLTKDNNITTGKIYQSVLEKERKGDYLGKTVQVVPHITDAIKDWIESVAVIPVDGKEGPADVCVIELGGTVGDIESMPFIEALRQLSFQVGPDNFCLIHVSLIPVLGVVGEQKTKPTQHSVRELRALGLTPHLLTSRSAEPLLESTKEK

SEQ ID NO: 280137 - protein, 488 aa, Glycine max
  unsure (1)..(488): unsure at all Xaa locations
  Clone ID: PAT_MRT3847_94988C.1.pep
MRRGLDNQAYYVLGHKTPNIRDLYTLGRKLGQGQFGTTYLCTENSTSIEYACKSISKRKLISKEDVEDVRREIQIMHHLAGHKNIVTIKGAYEDPLYVHIVMELCSGGELFDRIIQRGHYTERKAAELTKIIVGVVEACHSLGVMHRDLKPENFLLVNKDDDFSLKAIDFGLSVFFKPGQVFTDVVGSPYYVAPEVLLKHYGPEADVWTAGVILYILLSGVPPFWAETQQGIFDAVLKGHIDFDSDPWPLISDSGKDLIRKMLCSQPSERLTAHQVLCHPWICENGVAPDRSLDPAVLSRLKQFSAMNKLKKMALRVIAESLSEEEIAGLREMFQAMDTDNSGAITFDELKAGLRRYGSTLKDIEIRDLMEAADVDKSGTIDYGEFIAATFHLNKLEREEHLIAAFQYFDKXDGSGYITVDELQQACAEHNMTDAFLEDIIREVDQDNDGRIDYGEFAAMMQKGNAGIGRRTMRNSLNLSMRDAPSAQ

SEQ ID NO: 280138 - protein, 55 aa, Glycine max
  Clone ID: PAT_MRT3847_94989C.1.pep
YKAGYYARPLTGGAVTGTEIEMIRNISLADNLVFFISNLWAIPQNQGEENDQRTA

SEQ ID NO: 280139 - protein, 191 aa, Glycine max
  unsure (1)..(191): unsure at all Xaa locations
  Clone ID: PAT_MRT3847_9498C.1.pep
ESLKRTGFHXDIIRVSGWTATPMQDVQATIDWLIPSQECVPRTYCVLNPQNPFVLNRWMGKLTFPQGTSRSVKRMPLSIGGGAGAKNAILMNMPNAVLSMWRYFVGDLAFAVAKMTSTYIKCTVSFFIALAQLDDHTIHVEASSHKLVHFGQIQEKDVLQSSQEECVTARPPQVRPATTLAVDGRTYLYAM

SEQ ID NO: 280140 - protein, 104 aa, Glycine max
  unsure (1)..(104): unsure at all Xaa locations
  Clone ID: PAT_MRT3847_94990C.1.pep
MKMPKPQLRTPFIECFTVLLTIIDVTSAYALYGASTPVLXLTHCDFKSMDLNSDGVVLIECFAPWCGHCQALTAIWDKASTDLNGVVTVASIDADAHTCLAHEY

SEQ ID NO: 280141 - protein, 170 aa, Glycine max
  Clone ID: PAT_MRT3847_94991C.1.pep
EIEPYLNGRCIYLVDQSLGMMGSGKTTVGKILSQVLSYLFFDSDALVEEEVDGTAVADIFKHNGEPFFRNKETEVLRKLSMMHRYVISTGGGAVVRPINWKYMQQGISVWLDVPVEALAQRITAVGTDSRPLLHYEEGDAYTKTFMRLSALFKERSEAYANANVKVSLET

SEQ ID NO: 280142 - protein, 55 aa, Glycine max
  Clone ID: PAT_MRT3847_94992C.1.pep
VRSRITATTLIGCKTQRENNNKVVSLPPTWNPSRPIKQTAQTTQYHKLNFPIFGP

SEQ ID NO: 280143 - protein, 91 aa, Glycine max
  unsure (1)..(91): unsure at all Xaa locations
  Clone ID: PAT_MRT3847_94993C.1.pep
LQLWHCRYGYLGFKVLNHIAAEXTVNGLPLLKSXQLCKDCLMGKQQRYPFLMKSTWRASQILQLVHCEICGLIKPTIISNKKKKKHLITFT

SEQ ID NO: 280144 - protein, 215 aa, Glycine max
  Clone ID: PAT_MRT3847_94994C.1.pep
MVSQSYLLNLNTFRVHAGISGRQCKPSIFKPSNFGFRVWKSSKYHTKRNVNGNSGVMQCCSCYTEVGASAGITISSLVNAATTHISLNSDVDLNTLKLSIQETSPASTDLMTRLVLADLDPDTAKLAIGFLGPFLSVFGFLFILRIVMSWYPKLPVGKFPYVIAYAPTEPLLIPTRKVIPPLAGVDVTPVVWFGLISFLNEILVSSQGLLVLLLV

SEQ ID NO: 280145 - protein, 55 aa, Glycine max
  Clone ID: PAT_MRT3847_94995C.1.pep
RRLIHAPFLLRYSWPLSLDLRIFQASEALRLGNEINLKDVLTTSDLIQGGHDIQP

SEQ ID NO: 280146 - protein, 41 aa, Glycine max
  Clone ID: PAT_MRT3847_94996C.1.pep
GVYDHNPLLIVRWDTQHMALFPGIKSNFPSINPLHFYLLMQ

SEQ ID NO: 280147 - protein, 60 aa, Glycine max
  unsure (1)..(60): unsure at all Xaa locations
  Clone ID: PAT_MRT3847_94997C.1.pep
GKLSCXFPLXLIIITLHQHSXXGFRXREXXGARYFRXFGGAXEPXPXXSQSPSXXRTQLX

SEQ ID NO: 280148 - protein, 77 aa, Glycine max
  Clone ID: PAT_MRT3847_94998C.1.pep
DCFRGSIWDSDTIESELNPNFSFTCVPLLVCYEVGPTVLLFDIHPSFHATFPAFPNIFLPIVTCLLPCFVPSLRTRG

SEQ ID NO: 280149 - protein, 63 aa, Glycine max
  Clone ID: PAT_MRT3847_94999C.1.pep
TTDWGIQYVFLPKTKIKCVEQLEEINNLYRSIDHRRYDKPKAMIMRDRTYGILASIGLMHIEA

SEQ ID NO: 280150 - protein, 68 aa, Glycine max
  Clone ID: PAT_MRT3847_9499C.1.pep
LHSLLHCSDCRQSVLFEKHLGVGANVCFVIFFGDNRLFEKTFLFAEIGHLGCYYSIATSIREFSTSLP

SEQ ID NO: 280151 - protein, 174 aa, Glycine max
  Clone ID: PAT_MRT3847_949C.1.pep
MKSAKNINLNEILSNASSNTLVSQSGLGIMDGEQKHEEQLAVLPWLRPKTTCKNVAQNAGGLNVFQLASSSNKDESGKGSNGKFIHNVTTGLCSNDLEPKRREVSDSSSKRKILGVPIFDISHISAKESSSFTSSSVSVPNPSDVELVGNNQRKHILDINLPCDASVPEFDKQA

SEQ ID NO: 280152 - protein, 113 aa, Glycine max
  unsure (1)..(113): unsure at all Xaa locations
  Clone ID: PAT_MRT3847_94C.1.pep
MDVYEATRIVGLQMQIXVPENACEIMGVLLLPDHGGNEMIRLAFVLEALVXSVILKASKEVRLPFNCTITDSTGGSSSPFIYRQNINTFSWIRGTGFPPALTIPKPSSRTTLC

SEQ ID NO: 280153 - protein, 37 aa, Glycine max
  Clone ID: PAT_MRT3847_95000C.1.pep
APLIKMENTKGCRSTQPKKNTEVKGPGYNKTAQGRRQ

SEQ ID NO: 280154 - protein, 43 aa, Glycine max
  unsure (1)..(43): unsure at all Xaa locations
  Clone ID: PAT_MRT3847_95001C.1.pep
HTXXXNYLTLIKYFYPGNFQTTETLLFHKTNXQYLIFKVPIIK

SEQ ID NO: 280155 - protein, 131 aa, Glycine max
  Clone ID: PAT_MRT3847_95002C.1.pep
EHRVRYKNKRVALSVFRKKKKKKKKGRKEKKKKKKKKKKKKKKKKKKKKGRPFKRTKFYYPGHPTKNLFKRAPKIKLMARLLKTPELEKPCVTQIKPLGKKSPFAKLPKNQKGPTQPPFQKFPNPKWQWDP

SEQ ID NO: 280156 - protein, 44 aa, Glycine max
  Clone ID: PAT_MRT3847_95003C.1.pep
PQTPHQPIIYIYWGNQKRLKARVGYLIPRPWHDAGHGKGSQSNN

SEQ ID NO: 280157 - protein, 59 aa, Glycine max
  Clone ID: PAT_MRT3847_95004C.1.pep
PNNSLLYTITNHPFNQLFFPILLKTPLLSSLSKIFSYTTLLSFLTLLFNFSPTIYSTQI

SEQ ID NO: 280158 - protein, 55 aa, Glycine max
  Clone ID: PAT_MRT3847_95005C.1.pep
LRSLLINVNRPSIRSLIMTVGIALIGSRIFAKEEHLPAIQNTQSLSLKAVYSRSL

SEQ ID NO: 280159 - protein, 73 aa, Glycine max
  Clone ID: PAT_MRT3847_95006C.1.pep
SGAQILIYKCLSSISPPPPFSISQQTLCNQMAPTKTPFNFHKLQLCFYKPSINLLRGGILVHTTEHSITLIQT

SEQ ID NO: 280160 - protein, 74 aa, Glycine max
  Clone ID: PAT_MRT3847_95007C.1.pep
VCGPKNGLEMWSLKWASHTSGHLSCLIPNPKLCAVFTILLGFSLDFERAGNTLMPAVSVPQAVARSSEDWESSA

SEQ ID NO: 280161 - protein, 71 aa, Glycine max
  Clone ID: PAT_MRT3847_95008C.1.pep
SPLNESSENMIKEVASFIVPRENRMGLKPSPVLLDVGCSVVLGKLSASWSRRFQIVSRNHSDGIPIRQLIS

SEQ ID NO: 280162 - protein, 79 aa, Glycine max
  Clone ID: PAT_MRT3847_95009C.1.pep
IPQPYLIPGRPPLGGPPVQVGVFYLNNHWNPFHPKNWIPPPCPPGPLGSPRNFRPGPARGPSFPFRRPIKTWGNPGPNR

SEQ ID NO: 280163 - protein, 55 aa, Glycine max
  unsure (1)..(55): unsure at all Xaa locations
  Clone ID: PAT_MRT3847_9500C.1.pep
MKTAXRRKPPXEQDSQEEPNKDPMSRGLCLVPESRPLHAGTDNGAHYRAPRPWRG

SEQ ID NO: 280164 - protein, 55 aa, Glycine max
  unsure (1)..(55): unsure at all Xaa locations
  Clone ID: PAT_MRT3847_95010C.1.pep
ARNRERGRFFFHIXFFCFPIRQTDIPFKESTFRRVDNKPCLKTINPQKITTITYI

SEQ ID NO: 280165 - protein, 171 aa, Glycine max
  Clone ID: PAT_MRT3847_95011C.1.pep
MMPTPLQVRRRPVFEFDDEHLQNQKPTIPMELQIVSSQQHFRLPDGWVVEKKPRPSHESRFDKYYYEPGTGRKFRSLLSVQRHLAGETRDYVVANTMMSKNENTNFIESGSGQKFASMHNLTVPPPAKVSWVLSGSGGFWSPFLDDSIVPEPEKMKWSKAFVLSIHDDGVT

SEQ ID NO: 280166 - protein, 39 aa, Glycine max
  Clone ID: PAT_MRT3847_95012C.1.pep
CCVEITDELKLQRSYMECNSSLKETSLFSIPTHILLSLL

SEQ ID NO: 280167 - protein, 45 aa, Glycine max
  Clone ID: PAT_MRT3847_95013C.1.pep
ILRQLDHPKGIYRRIDHAGEMVNIIVVVVVVNRLFTRKIFAAGSA

SEQ ID NO: 280168 - protein, 85 aa, Glycine max
  Clone ID: PAT_MRT3847_95014C.1.pep
HCLTHLSSLYNKLTGPKFWCFSKYHFNQINVVNYNNNLTRPLVCLCSQVYMVSVYELFTLFSWLIVLMKYCRSTLEDPRVQSSNS

SEQ ID NO: 280169 - protein, 310 aa, Glycine max
  Clone ID: PAT_MRT3847_95015C.1.pep
SEWAKPQQATVPADKRWPSAESNPSISYSLASPLRMSPQPAKSETQYMPAGGDFKNLQSGVAREQLIMMQRPQTVNAKQVPATSMSSSPPRIAASWYPTNSSDAVRSNNGFISHAPSTRSLSPNYLNSNQMYHQLQYQPQQYQFVGGSSSNSVDHQGNSIWNRTDATAPLAAATSLGLFSGLGSAGSSGASSPVDWSTGGTVQFDYTNIDWSLDRSLASPRSNGLWLGFSPFSRSSSAQMYDSNALGVVAQSSMRPVPTNGSMNAPMPGLQDGGVASAETSTAGSREWSSPFEGKDLFSLPRQFVSSPSL

SEQ ID NO: 280170 - protein, 105 aa, Glycine max
  Clone ID: PAT_MRT3847_95016C.1.pep
NGKKNIQIWAGQFFRSNGEIALFNQGKKKKGQISVKLAKLLFCGKVRKKFQVPSFPGQRWGKTDEVVNRCLVQSIKRIRFGFQKKKKKKKKKGGGGGGGGGGGGE

SEQ ID NO: 280171 - protein, 249 aa, Glycine max
  Clone ID: PAT_MRT3847_95017C.1.pep
FPVFSVHFQAAASPSQSCNSISSTIMLRKLVSGPRKNKPGTVPVHLNVYDLTPINGYAYWLGLGVYHSGVQVHGLEYGFGAHEHDTTGIFEVQPKHCPGFTFRKSIFIGTTDLGPKDVRAFMEKLAQDYSGNTYHLISKNCNHFCNDVCLKLTGKSIPRWVNRLARLGLLCNCVLPPGLNDTKVSQAASDRVQEGEKRKIRSQSCRYEGSSNPSSSQRSAIKSSSSQRHCHPPSSSLINAASASTLTVK

SEQ ID NO: 280172 - protein, 103 aa, Glycine max
  unsure (1)..(103): unsure at all Xaa locations
  Clone ID: PAT_MRT3847_95018C.1.pep
FKTFKKKKGRGFNPPPGLGAKIKGLSPKKGVIIKLKIPPLPPPRGGFFPKKNDWAPKKPLYLVGKPGKKKKKKKKKTKKKKKKKKXKKKKKKKKKKKKKKKTK

SEQ ID NO: 280173 - protein, 93 aa, Glycine max
  unsure (1)..(93): unsure at all Xaa locations
  Clone ID: PAT_MRT3847_95019C.1.pep
NPRGRPPPPLPEEIEGKMKVLREEXTXXLDRIEXEYRXELXGLRRDAESKEEKLGEXWGGKDLRLTKFVEEVGCFFWVSGPDGRWRGIDSWEM

SEQ ID NO: 280174 - protein, 239 aa, Glycine max
  unsure (1)..(239): unsure at all Xaa locations
  Clone ID: PAT_MRT3847_9501C.1.pep
KDLAQDKVIAACAAVCPTSSYTPTTLLESGFAKDRGLIVEYFGRMYHVAHNANQPQEKDSLEGNYCFDIKSRSRLEKASCTEAQLVSGKTFKYXDIIGAGSHSSEDFPDKEDQEKPKKIDARLRQRIDPQYNEVHAQMETNLIKSSLDDVETPKGSMLDLKISQSKIALPKNTVGGTILRSDLLANFLTEGNFRASVDLQCTHRIKRMIKMDATSGITXNTGIALACAINSSLMGRVKF

SEQ ID NO: 280175 - protein, 146 aa, Glycine max
  unsure (1)..(146): unsure at all Xaa locations
  Clone ID: PAT_MRT3847_95020C.1.pep
SAYRVKNREPSELNFVYCYYFSWFKCSFRSLCLDSLVLQVAERALFLXWNNEHIVSLIAQNRTVILPIIFQAFEKNISSHWNQAVHGLTMNVRKMFLEMDAELFEECQRKHAEKEAKAKELAEQRELNWKRLADAAAQNGVEDMVT

SEQ ID NO: 280176 - protein, 130 aa, Glycine max
  Clone ID: PAT_MRT3847_95021C.1.pep
AEFQRCMVPLFRQISRCLNSSHFQVAERALFLWNNEHIVSLIAQNRTVILPIIFEAFEKNISSHWNQAVHGLTVNVRKMFLEMDAELFEECQRKHAEKEAKVKELAEQRELNWKRLADVAAQNGVEDMVT

SEQ ID NO: 280177 - protein, 141 aa, Glycine max
  unsure (1)..(141): unsure at all Xaa locations
  Clone ID: PAT_MRT3847_95022C.1.pep
STQWLKFDDERLSKVDPKWVVGEQHGGAGQLPTXKPGFNHHPIKWTQHSXNALLLMYVRVTSQDXNIFGCRLNDIAEHLRMRFKKEQDEMELYRAEKAEAQLYTTIKDAWDEDLLEXIGKNIPSDLADFDKVRSFFFSNPN

SEQ ID NO: 280178 - protein, 97 aa, Glycine max
  Clone ID: PAT_MRT3847_95023C.1.pep
KTYCKSKECGKHTLHKVTQYKKGKDNISTQGKHHYDHKQSSYRGQTKPIFHKKAKTTKKIVLKLQCQGYNHVSQHTIKKYKHFKINDNKKGKRTSLF

SEQ ID NO: 280179 - protein, 43 aa, Glycine max
  Clone ID: PAT_MRT3847_95024C.1.pep
SGSSTIIIVFFIVYAVIWYEQPLYKGLAFAVSHGKLGDNLNLC

SEQ ID NO: 280180 - protein, 48 aa, Glycine max
  Clone ID: PAT_MRT3847_95025C.1.pep
VTNIFWIFWHRACLGHKGPLPIEGKQGNKNGTTRYFIRWPHHTLKGID

SEQ ID NO: 280181 - protein, 92 aa, Glycine max
  Clone ID: PAT_MRT3847_95026C.1.pep
KLDPWNLTFRNFIPDDLCVVGGILPTRPKIWSQLHLCSCSNMQMHDAYIGNLLNVSRELYLFRTEEARQLRRKALSRIEWLQKADVPTISQI

SEQ ID NO: 280182 - protein, 145 aa, Glycine max
  unsure (1)..(145): unsure at all Xaa locations
  Clone ID: PAT_MRT3847_95027C.1.pep
TFFWFFLGCFFFSLLGLSSRDKISTHRSILDLDLTKXTTQKQVSSLFQLWKGGRGQDYHTHEXNAXGLESLKNNLNYIMDMNANRKSPHPHRWGLNKFADLTPQEFSKKYLQAPKDESQQTKMAHKKMKKEQYXCDPPPASWDWK

SEQ ID NO: 280183 - protein, 58 aa, Glycine max
  Clone ID: PAT_MRT3847_95028C.1.pep
TALPLTYLTRHGPITPQTFHPKKARYTTYSFHIPSRAAITSKGSDSASHSAITYSTST

SEQ ID NO: 280184 - protein, 100 aa, Glycine max
  unsure (1)..(100): unsure at all Xaa locations
  Clone ID: PAT_MRT3847_95029C.1.pep
FHPFVFCQGFHEFQARKMGKRNVFXGIPRGKLFFGLIGKTKIPPGGRGGVFKKFFCPKRVNWGQWGICLGLTPVFWPNGWGGKVKPVPNKPFPRFFGKKK

SEQ ID NO: 280185 - protein, 148 aa, Glycine max
  unsure (1)..(148): unsure at all Xaa locations
  Clone ID: PAT_MRT3847_9502C.1.pep
TLNYMCAYGLNPGISGSRLLGTIPQSISQQTVWNQMATVRTPLNFDSSKQSFCQFSIDLLGGGILVDKTGDWITLIQNSPISYLLRVAAWKKGXLMVKIVMSGNAXAVKRSDXASLVKVFXTNSNSSEHFDAXKWTKSEPHFWELIFP

SEQ ID NO: 280186 - protein, 152 aa, Glycine max
  unsure (1)..(152): unsure at all Xaa locations
  Clone ID: PAT_MRT3847_95030C.1.pep
MTDRDRDRDRHRTRDRERELRTDIDDRDRYRDRARIKRSRSRSPDRGRSRLLRSPYTNERSHRRRHSRTPSTDPTRKLHRRDSTEEEHTETKKALSDFADGIVTEQQQKLHNDYGHGGGETEGNEDKLHMMKMFGISTGFXSTRGKPVPGLS

SEQ ID NO: 280187 - protein, 230 aa, Glycine max
  Clone ID: PAT_MRT3847_95031C.1.pep
YNLRNYWLCRLIRMWKAMLECHHAQYITISLAYHSRSTPGTLQGDALREIMTRLLEEVEFFGLSFANWINTGAAYVEAVNAWLQNCILQPRERTKSRRPFSPRRVLAPPIFVLCRDWSAGIKALPSEELSQAIRNFLSDLHLQTEQHNDQLLKKQNSVNASMAETESKTNEENEDESTNLSCIHARLTKVLDRLTKFSEASLKMYEDIKQKSESARNAYHNCRTIRAEKF

SEQ ID NO: 280188 - protein, 200 aa, Glycine max
  Clone ID: PAT_MRT3847_95032C.1.pep
MAGEDQNKGKASSCHPTKGSSRHLPRMTTQIPQYALSDTVYHPSDPPARTSDVTPPPSIQGVHSPCTSQPTNSDAGRTLRSSIALETQSNDGKPILCLDGQGFLPSRPAANGITDILTSHYIDPWPSWKKIPISSRDSWFEEFLIKFSISPPDYNWAKKNFEMRGSILLTNKLNKARTTMDKPNWIKDSVWEILCDHWRS

SEQ ID NO: 280189 - protein, 165 aa, Glycine max
  unsure (1)..(165): unsure at all Xaa locations
  Clone ID: PAT_MRT3847_95033C.1.pep
PGVASMFNTVATKTIPILVCAFXKDTGDTXRETPAIDESKGLLDDNAHLSIYDPHVTDDQPQKDAWMNKFDRNHAIHLPPANPTADKKDPAVWDAYYAAHDADGDCFLTVWDEITTLDYHKEHDNMRKPAFVSDGRNIDAVEKLHDIGFIEYSIEKPLDPWITDL

SEQ ID NO: 280190 - protein, 40 aa, Glycine max
  Clone ID: PAT_MRT3847_95034C.1.pep
VLRLIRQSLFPSSPKSSPPQDHLLVSLAQIGFLGWTGEQS

SEQ ID NO: 280191 - protein, 82 aa, Glycine max
  Clone ID: PAT_MRT3847_95035C.1.pep
PPARVRVCAHFFFKRELLSIAALNIGGYPTIHWVFLHQDFNQLLMPVSLCSVRNSKRNDDISYLGTAHSDPHCESACGILID

SEQ ID NO: 280192 - protein, 79 aa, Glycine max
  Clone ID: PAT_MRT3847_95036C.1.pep
IITFYHPGGVGHNYIIIGTIEKSVAYRFHAPSPQLLLLKLFFLEGHLPLARPGINILIVYFCFFFLFFFIFLFLLSKAY

SEQ ID NO: 280193 - protein, 71 aa, Glycine max
  Clone ID: PAT_MRT3847_95037C.1.pep
ESQIMLTMTRSSNRPLIAKLDSYKFHQQRSPGHQHPLQLLSNSKHPSLKKIFYFWIEVKHDWLKATHAVQF

SEQ ID NO: 280194 - protein, 62 aa, Glycine max
  Clone ID: PAT_MRT3847_95038C.1.pep
MVSYGSSDHYGDTNQSGVSLTPRLQQHGMSPALPPPSQSSLNYPRDQIKIPLTVHQYSLLGG

SEQ ID NO: 280195 - protein, 40 aa, Glycine max
  unsure (1)..(40): unsure at all Xaa locations
  Clone ID: PAT_MRT3847_95039C.1.pep
XFGNRYXPAXKSWPXIPXVPSCXNRSHVISYHNISSIXES

SEQ ID NO: 280196 - protein, 283 aa, Glycine max
  unsure (1)..(283): unsure at all Xaa locations
  Clone ID: PAT_MRT3847_9503C.1.pep
ANFVLAKNTAGGTILRRDLLANFMTEGNFIASVDXQSTHGLKGMIXKVATVGIPENTGIXLACAMNSTVRGRARSDIYTICCQDCELWNPACTKAMTMSFNPNACSDAWSLECXKRTGLHXDIICVTGWTATPMQDVQVTNDWLIYSQECVSRTYCVLNPQNPFVLNRWMGKLTFPQGTFRSVKRMPLFIGGGAGPKMAFXMNLANGVLLMWRYFVGDLAFEVSKMTSPYIKCTGSFFIAFGNLVDDTINFEAFSHKLVHFGEFQEKXLIXFSHEEFLTAWST

SEQ ID NO: 280197 - protein, 61 aa, Glycine max
  unsure (1)..(61): unsure at all Xaa locations
  Clone ID: PAT_MRT3847_95040C.1.pep
MEETFVPLRGIKNDLKARIPCYRQDWTSGFQAGXDGSLTAVQTLASTALCGVIHSIIGGQP

SEQ ID NO: 280198 - protein, 50 aa, Glycine max
  Clone ID: PAT_MRT3847_95041C.1.pep
KHVRGRSSRGLHSDQRCICETINITPDRDTRILRIIHNNKKGGRRYTHFF

SEQ ID NO: 280199 - protein, 147 aa, Glycine max
  Clone ID: PAT_MRT3847_95042C.1.pep
QHAALIETVPFKTVAMFTLFQTAYLLLCFGLTWIPIAGVLFPLLIMLLIPVRQYFLPKFFKGAHLQELDAAAYEEAPAISFNLSFDDSGSQTTTVNNNSGEILDEIITRSRGEICLNQKSRCSTPKSCEDTVPAYGNISKDSQLSSN

SEQ ID NO: 280200 - protein, 233 aa, Glycine max
  Clone ID: PAT_MRT3847_95043C.1.pep
PYPRDWLVLDEYNYSSFCSPRRTIKNFYTSLSLFSNFPNKLSFSSNNAANLLHGNQHPKNILSRPPWPLLYFTSFQILLRFLLFLRGKILSHVSSNMLFLCMLLRRKIRSRQTFNIIPVKIMFRMIGILSQIAAFVFIRLQLQLRKPSSIMFIRLQLREPRVINHISSIVFIRMVLWKLRVLRHIACILSIKNFPRHPSSMILEASEDGEKRKTVAFGYVENGASQNLGFCKG

SEQ ID NO: 280201 - protein, 87 aa, Glycine max
  unsure (1)..(87): unsure at all Xaa locations
  Clone ID: PAT_MRT3847_95044C.1.pep
IFPITKKFXKSTKSFAPTPSFSYNISNNPVNFKSNISFNLSQNPVTNFLDNYILFHSFIYFSTITLIFKNTLFSKPFFTKIKIFFFL

SEQ ID NO: 280202 - protein, 651 aa, Glycine max
  Clone ID: PAT_MRT3847_95045C.1.pep
EETFVPLRGIKNDLKARIPCYRQDWTSGFQAGIRILAPTTYIFFASAIPVISFGEQLERNTDGSLTAVQTLASTALCGVIHSIIGGQPLLILGVAEPTVLMYTFMYNFAKDRKDLGHKLFLPWTGWVCVWTALLLFLLAVLGACSIINRFTRIAGELFGLLIAMLFMQQAIKGLVEEFGAPKNQREGTNQVALQSSWLFGNGMFALVLSFGLLFTGLQSRKARSWRYGSGWLRGFIADYGVPLMVLIWTAVSYIPVNEVPRGIPRRLFSPNPWSPGAYSNWTVVKEMLNVPPLYIVGAFIPATMIAVLYYFDHSVASQLAQQKEFNLRKPSSYHYDLLLLGFLTILCGLIGIPPSNGVIPQSPMHTKSLATLKHQLLRNKLVSTARKSMRRNVNLSQLYQNMKEAYDEIQTPLVPQMPTTLGLKELKESTIELASSQGYIDAPVDETVFDVDKDVDDLLPVEVKEQRLSNLLQALMVAACVAAMPLLKKIPTSVLWGYFAFMAIESLPGNQFWERILYLFTAPSRRYKVMEEHHAAFIETVPFKTVAMFTLFQTAYLLLCFGLTWIPIAGVLFPLLIMLLIPVRQYFLPKFFKGAHLQELDAAAYEETPAISFNLSFDDSGSQTTTVNNNSGEIPVEIITRSPGEICLNKK

SEQ ID NO: 280203 - protein, 253 aa, Glycine max
  unsure (1)..(253): unsure at all Xaa locations
  Clone ID: PAT_MRT3847_95046C.1.pep
MSGEVFDGQDAGYVPENPEFPQNHSDEYDGGNVIDDSGFPQLQPDEHDNGGFPQLQPDEYDAGGFPQLQPDEHDAGGFLQLQPDEHNAGNLAEDGNIPEHNFDGNDVEGLPGNPDLPSQEHAEEQNIGGDVTENFGSEEKRGPEEDLKGGEVKKWPGWPGENVFRMLVPVQKVGSIIGRKGEFIRKITEDTKARIKILDGPPGTSERAVILVARSVHSLVMVSAKEEPDCSIPPAVDGLXRVHKQVVNVDPHS

SEQ ID NO: 280204 - protein, 103 aa, Glycine max
  Clone ID: PAT_MRT3847_95047C.1.pep
HILISFNIQKLLVSPIPYYLETFTKHFLFITVDDIKTQTSNKINSIVFPVTNLLLKSLLAKEKIESLCDLSFLATYESIKTFICSQRIDISESFTQAFAYITT

SEQ ID NO: 280205 - protein, 94 aa, Glycine max
  unsure (1)..(94): unsure at all Xaa locations
  Clone ID: PAT_MRT3847_95048C.1.pep
RXFPXNYGXHXTNHLXIXLPXREGTXEXATYHLXPXPVHSGSXXFSAPPDLFTPXSRTIIVXMAQAHXLFSXSILASXCXLXHSPKAXLFPXXV

SEQ ID NO: 280206 - protein, 63 aa, Glycine max
  Clone ID: PAT_MRT3847_95049C.1.pep
PRVRLTMAFITSYSSFASLSVGASFPIYICSSSSMFPPPQKPCFKPREGYSVIRVLSVRGYFP

SEQ ID NO: 280207 - protein, 178 aa, Glycine max
  Clone ID: PAT_MRT3847_9504C.1.pep
FASCENHVDQIPLLAQEEILSSSASDFRTAMASKNSKPQATAMHVGAIEIIIDSFASPDCNIAGATLLVDTYHTNPENAVRNILDAPFRGGRPIPVVTFTNTIVQIELEMNLRFQLLSTTSNGDFVQGKDLAMVKVNVACAAVGLTSSYTPTPLLESGLQKARGLIVEYFPKDVLGCL

SEQ ID NO: 280208 - protein, 203 aa, Glycine max
  Clone ID: PAT_MRT3847_95050C.1.pep
MKRGNEEEKSAGPMFPRLHVNDAEKGGPRAPPRNKMALYEQFSIPSQRFNPHLPRKPNSSSNIVPPPTSSTEGNGRERSYISRQSDDGARSNTSLVQLERRKKVDDGIHVYTCSRIDQSNDKMLESFNGKKLTPFGARNFCYSVAVQNGGDKDTTQFGFLPADMRKDARKGNEANTHVSSSRQKLKLSVKPKSSGEIIDSLVM

SEQ ID NO: 280209 - protein, 62 aa, Glycine max
  Clone ID: PAT_MRT3847_95051C.1.pep
SISSPTSSMHDKYHLKQTYTHRFCNTLSKFKYITWKQDNKIKLNSNLIYIVKTQLTLDNSHK

SEQ ID NO: 280210 - protein, 128 aa, Glycine max
  unsure (1)..(128): unsure at all Xaa locations
  Clone ID: PAT_MRT3847_95052C.1.pep
IGTKLADDITIYGAHDTGTSGXHMSRAALKXGRAHAQMENKRXNLLKAVGTHVCXPLMAKEVVAPLXDALHNAQRYDRMPQEAEPQAIEVSKRYAQVTEMPPSAQNTMRLXAPGAKLQDLYSHMTILG

SEQ ID NO: 280211 - protein, 118 aa, Glycine max
  Clone ID: PAT_MRT3847_95053C.1.pep
NSARDDSEKDGFLKRLLRDSKGDDEFGQKIRDAFLFRKSSEKYDEDSEKDNILKRLLRDGRGDDLESEKDGFFRRLLRDSKAEDEDLASSSEGFFKRLFRDSKNDSDDKTNTKTMEKT

SEQ ID NO: 280212 - protein, 221 aa, Glycine max
  unsure (1)..(221): unsure at all Xaa locations
  Clone ID: PAT_MRT3847_95054C.1.pep
MEAWFIILVTLCVCVLIRAILFSLHKKTITIPPGPPHIPIISSILWLRKSISELEAVVKTLHAKYGPIITLRIGTEPTIFIADHSLAHQALIQHGSLFANRPKDGGFKILTNNRHQINSSSYGATWRTLRRNLASQMLHPSRVKSFSGIRKEVLHTLLTRLXQITESNKSIEVXDHFQYAMSCLLILMCLREPLDERXVRENRLRLRKLLLHFQRVHILNF

SEQ ID NO: 280213 - protein, 69 aa, Glycine max
  Clone ID: PAT_MRT3847_95055C.1.pep
NTDSALNVNPHPFTTCYHSHISLAISIQNSITHKLKLMALVSNHRHSFEALLGFLLFLGFRRVSISRAT

SEQ ID NO: 280214 - protein, 41 aa, Glycine max
  unsure (1)..(41): unsure at all Xaa locations
  Clone ID: PAT_MRT3847_95056C.1.pep
NQLSQRLKQFNNMNDFITSLNIYYTNPGCSLQDRXCSAASC

SEQ ID NO: 280215 - protein, 43 aa, Glycine max
  Clone ID: PAT_MRT3847_95057C.1.pep
LSTDYKILHKVTNTCSPKFKGEGYFMLGVGSLKNSQKPNTTID

SEQ ID NO: 280216 - protein, 93 aa, Glycine max
  Clone ID: PAT_MRT3847_95058C.1.pep
RSPKLGFFVQAIVPGKGPLETPVDPPGGPVNNKAWAYPPNFVPGKWALKKRMPCGLLKVFKFVFGEGNVIPMASQKCEFSWGPPPPLMVPPFS

SEQ ID NO: 280217 - protein, 48 aa, Glycine max
  Clone ID: PAT_MRT3847_95059C.1.pep
YIILTSYFRKWDLKFHRVMPALGLKHSIIITAPINSLLSIMISLANTI

SEQ ID NO: 280218 - protein, 158 aa, Glycine max
  unsure (1)..(158): unsure at all Xaa locations
  Clone ID: PAT_MRT3847_9505C.1.pep
ANDAETGSFDDAYDDNNHNMSLASWEGCLLKSFDEMDEYLAQEINTDSYCSGCTAVTLIKQGDQLIVGNLGDSRAVLCTRDRDQLIPVQLTVDLKPDIPSETSRIVNXEGRVFAAEEEPDVYRIWMPDDDCPGLAMSRAFGDFCLKDYGLISVPDVFY

SEQ ID NO: 280219 - protein, 123 aa, Glycine max
  Clone ID: PAT_MRT3847_95060C.1.pep
EPCPALSPQMSLSKVDNTPLGHKLVIFNRVFHFNRINGFRHVLNFNLCRCLDRGNQHISNDDVRVFRRKLDIMKRHEVRTCYYICKIKNYVLFYYNVHNYVVICSLCGSFTHQPLYHCCLPFV

SEQ ID NO: 280220 - protein, 88 aa, Glycine max
  Clone ID: PAT_MRT3847_95061C.1.pep
MVSGSDPVESFFNSVQVVKDSLSPLEVGIRKAAKDLEHCLAGSKNKVNNGVCLIAPVRESGAFQICDVKKKKGLSMKGPLKAFWGMFS

SEQ ID NO: 280221 - protein, 35 aa, Glycine max
  unsure (1)..(35): unsure at all Xaa locations
  Clone ID: PAT_MRT3847_95062C.1.pep
SCKCTTFTHTPXSNFTPMTPYKIISFTIDVAIIYE

SEQ ID NO: 280222 - protein, 199 aa, Glycine max
  Clone ID: PAT_MRT3847_95063C.1.pep
MNFNSTGGRHPAQRNSRKLKAGGDAAPASPMAPYPAPYNPSYPSYAPPPYGQPGADMYAQQHVSMPGGGEYMQPMQPQNMGGFPGGPQMNQGFAIPSQVFSQPIVADLAMQYGASMVGAGRQIVDRELEKYVPVSRLKYYFAVDTKYVANKLRLLFFPFTHSDWSMKYEQGQPVQPRFEMNAPDLYIPTMAYVTYVLLA

SEQ ID NO: 280223 - protein, 122 aa, Glycine max
  Clone ID: PAT_MRT3847_95064C.1.pep
GSPDLLRSPSGIVRPGSFPTTTLRKDSTAAPHCIAITIESKMALNMTYMNNENNESIAIPTMCLTSSTLSHITTTLDDLLIVLREAHETYVKESTFCMGKRYLMTLIEVKKKLTNVYHNDVL

SEQ ID NO: 280224 - protein, 96 aa, Glycine max
  Clone ID: PAT_MRT3847_95065C.1.pep
ARGDNPEVMEEDIEEEEVAEIKAAHFEESMKYARRSVSDADIRKYQAFAQTLQQSRGFGSDFTFANTSSGGGGAATGTASDPFASAGGADEDDLYS

SEQ ID NO: 280225 - protein, 650 aa, Glycine max
  Clone ID: PAT_MRT3847_95066C.1.pep
MAWSHKGKFFIFSLLFFFSSLHISSSPLDPESCSIQSKLDHDSCQEHDPEKPQIANHLNQQVLLDRLEELVRNLSDLVTRLESKLPDPPKEKGRFTQKKIGDDDEDARSSSKGVEDGEFEGKIRDGERARGTSVTKYTPFWSERFQFASALKLDSEATCINVLPFRDHEGLSKYVAVSDERGRVYVFTRNGDVLVEFDTSLESPITAMVSYTSVYKNESFVVTGHQNGEILMHRIWEGGSSGEDYSSVFMENVGKFLSPENWEDGLPVTLLEVHYVGRMKYILSADTSGKIRVFKENGSLHGSATPSSRPLVFLKQRLMFLTETGAGSLDLRGMKIRESECEGLNHSVARTYVFDATERSKAYGFTSDGDLIYVLLLGDVMNFKCRVRYKKKFDVDEPLALQAIKGYLLIVNPEKVFVYNVSSPHYVRVGVPRPVFSSGLDELRSSFLNNPTPSLDAETRVTPLIASDREKLVIVGLGGGYVGMYHSNLPIFKGEFNTMLWTSPVLFFILFLFGAWHFFAKKKEALTSWGPDDPFSSTSATTSAPLASGSGDRSFADSSSRSSEVMDLRGGNLRAPPRRYGSPSRYPGGAATSYRLGGASADHNARPASVDPDFRAASELKFRASTMDPPGFPKRRDGMFVGNQVVNDRS

SEQ ID NO: 280226 - protein, 129 aa, Glycine max
  Clone ID: PAT_MRT3847_95067C.1.pep
MKQEEWMITTALLSLLFVSSFPPLSYGVVPPRTLLNKLSEGKYLNTQELWFDQTLDHFSPYDHRQFRQRYYEFLDYFRIPDGPIFLVIGGEGILNGVANDYLAVLAKKFGAAMVTLEHRYYGKSTPFNS

SEQ ID NO: 280227 - protein, 95 aa, Glycine max
  Clone ID: PAT_MRT3847_95068C.1.pep
GRCCILFYTSVEKCQTIDFIHIKSTKYLPDHVGFERSTISTWATVGYSQPKKTLKKIGSFRVLSKRESWQCSLRGAPKRMGSFTAERCFLNAGFL

SEQ ID NO: 280228 - protein, 114 aa, Glycine max
  Clone ID: PAT_MRT3847_95069C.1.pep
MLTQAPYGPPFALIQGTLESYGSMFKDIPKEHCPTIRRGSVAWVGSGPECFISLADHGEWRNAYTVFGSVLSEDMEILEKIAQLPTKSEIWNNIKVSVLENPVSLRFRRMNKKS

SEQ ID NO: 280229 - protein, 220 aa, Glycine max
  unsure (1)..(220): unsure at all Xaa locations
  Clone ID: PAT_MRT3847_9506C.1.pep
FISSDSRTAMARKNSTPQATAMHGGAIEIIIDSLASADCNIIGAMLLVDSYHTNPENALRSIFAAPFRGGRPIRMVTFSNTIVHIEPDMNSRLXLLRTTTNGDFVQGKDLPMVKDNVVCACRALTFSYTSTTSLESGLQKDRGLIVEYFGRMSYVAHNINQPQEKYLPEGNFPFDLKPRSRLEKVSFTKAQFVSGKTFKFDXFGAGSHSSHRFFLKRYIL

SEQ ID NO: 280230 - protein, 125 aa, Glycine max
  unsure (1)..(125): unsure at all Xaa locations
  Clone ID: PAT_MRT3847_95070C.1.pep
MWRRNFLKLHHLSLRASGKRFVALWGNGDFGRXLGLGNLDSQWKPVVCPAFRDRTLKAIACGGAHTLFLTDNGCVYATGLNDFGQLGVSESKHYSEPXCVFGEEKKVVHVSAGYNHSCAITVDGE

SEQ ID NO: 280231 - protein, 139 aa, Glycine max
  Clone ID: PAT_MRT3847_95071C.1.pep
MLRRSFSKLHLSLRAPGLGFPTRSFSRDAGKRFAALWGNGDYGRLGLGNLDSQWKPVVCPAFRNKTLNAIACGGAHTLFLTEDGCVYATGLNDFGQLGVSESKHYSVEPLCVFGEEKKVVQISAGYNHSCAITVDGELY

SEQ ID NO: 280232 - protein, 101 aa, Glycine max
  unsure (1)..(101): unsure at all Xaa locations
  Clone ID: PAT_MRT3847_95072C.1.pep
REKVVLKFSQEEFLTGWSTHVRAVTTMXDDGCPYLSARVHDRSESTIPGDFVNEVKVATIINMCAYGINPGFXRSRIVSTIHYFMXQQTVWYEMATVRTPL

SEQ ID NO: 280233 - protein, 61 aa, Glycine max
  Clone ID: PAT_MRT3847_95073C.1.pep
FFFMLGTILFTRHSFPVPPNQEHVQGDVIVMKWYSGMYIRVQFEKILNKFALLTDDPSGWI

SEQ ID NO: 280234 - protein, 46 aa, Glycine max
  Clone ID: PAT_MRT3847_95074C.1.pep
AFICCDEEMLTGHDESETLAAQDNGFVKSLERIYERSQAIDSSTAQ

SEQ ID NO: 280235 - protein, 54 aa, Glycine max
  Clone ID: PAT_MRT3847_95075C.1.pep
VKLLNDNQDTLASVRGGSQTLKLAKELFAAEMEIDKSSLTEKAQSVRYQILLYF

SEQ ID NO: 280236 - protein, 126 aa, Glycine max
  Clone ID: PAT_MRT3847_95076C.1.pep
HSLFQRSCSASKKLWHISAPSIFTRLAMFSITVVTQSLAGHLGDLDLAAISIACTVLISITFGFLLGMASALETLCGQAYGAGQQRILGVYLQRSWVVLFLSSILLVPVFIFATPELKLIRQPVAV

SEQ ID NO: 280237 - protein, 131 aa, Glycine max
  unsure (1)..(131): unsure at all Xaa locations
  Clone ID: PAT_MRT3847_95077C.1.pep
ATRSTTRPPTRPISFYFLLHSTNSWAAIFNNNWFLSISSRPPILLYYYHPLFQTSNFNLXLIPERLSHTTLAISHHLFEVTHDISHLTCTYILQAPKVHTPVIVTFSTVIHDRVIPXTFTHPKCFSFKFYT

SEQ ID NO: 280238 - protein, 105 aa, Glycine max
  Clone ID: PAT_MRT3847_95078C.1.pep
SCWSSVLQFTPCLVLCCYASTRNTLYYRKLHTPSCGLTDIALQKSMWNYFPHFQVRGFLPPYSPVSVPTSRVAVLIFCLSGCQHVRALHSSVIVSFLWQASMVER

SEQ ID NO: 280239 - protein, 68 aa, Glycine max
  unsure (1)..(68): unsure at all Xaa locations
  Clone ID: PAT_MRT3847_95079C.1.pep
SVXSLVFFQSXSXXTNTXMSWLYRXTKSXLLSSSSSLSXTFPXXXXSGPTLXLXQMEXSXPSPICGXX

SEQ ID NO: 280240 - protein, 97 aa, Glycine max
  unsure (1)..(97): unsure at all Xaa locations
  Clone ID: PAT_MRT3847_9507C.1.pep
LGHIVYNNLQNHIFINILKKHDFWNETESAVKKSLXKTDXKILVQALVLGQIGSKAVSAILFDGQKLIVTNVGDSRNVICENGKAKHLSVSNIFLLI

SEQ ID NO: 280241 - protein, 69 aa, Glycine max
  unsure (1)..(69): unsure at all Xaa locations
  Clone ID: PAT_MRT3847_95080C.1.pep
ACAMNRCFWGRARTDIYTICSQDCEIWKPACAXAMTMLFNSNACSETWSXEYLKSTRLEXEIIAYTGWT

SEQ ID NO: 280242 - protein, 96 aa, Glycine max
  Clone ID: PAT_MRT3847_95081C.1.pep
TFRGKPPTLPKKKGKKPKRRGLRALPKLKVPLGVTPPPPRVFGPLKGGFPFPFRGANFLEGGLGGALFFFPPLGKRGFFPKRFFWVTPGFFQSPRF

SEQ ID NO: 280243 - protein, 46 aa, Glycine max
  Clone ID: PAT_MRT3847_95082C.1.pep
VLGGSLSKKEKGICYGKREIRLSPSGLATWPPHFKAPIHQTHLSFS

SEQ ID NO: 280244 - protein, 42 aa, Glycine max
  Clone ID: PAT_MRT3847_95083C.1.pep
QFPRFQSPAPVARNYGLKRAQAVKNIRPSETTGRYVTHRFVV

SEQ ID NO: 280245 - protein, 55 aa, Glycine max
  unsure (1)..(55): unsure at all Xaa locations
  Clone ID: PAT_MRT3847_95084C.1.pep
FLRFTPPKRLLNYGFVKAGIPNLPPEPFVLFXKNLWPSLHKSNFFFFFLSSFSGC

SEQ ID NO: 280246 - protein, 104 aa, Glycine max
  Clone ID: PAT_MRT3847_95085C.1.pep
MFMRQTDLKSQSCLLFPAYLPWCPWIYRDLNDESFPSDLGSLSLLQDLDLSGNNFVNPPAQCIINLSMLQNLSFNDCPRLKSLPMLPPNLQGLYANNCPKLKPF

SEQ ID NO: 280247 - protein, 58 aa, Glycine max
  Clone ID: PAT_MRT3847_95086C.1.pep
GATRRDIAYLLRAQEPDRHHGGCRACSLLLWSALTHTRCGLHHRAVLPRGHCTRSLHL

SEQ ID NO: 280248 - protein, 86 aa, Glycine max
  Clone ID: PAT_MRT3847_95087C.1.pep
APSRTGTCRICSQDSAPTPRSADAPSRSTFAPARALLAWRACNSCSSTSCVFSRLALICSFPWMIARFNINSITQNNVGVLLGSIL

SEQ ID NO: 280249 - protein, 38 aa, Glycine max
  Clone ID: PAT_MRT3847_95088C.1.pep
RLPLLPTLGPGKHAYKLYSEWDCYFGIPIAFYFKIFMQ

SEQ ID NO: 280250 - protein, 123 aa, Glycine max
  Clone ID: PAT_MRT3847_95089C.1.pep
MDAPRVSRAIGDPKIRRVGFFASDSSATDSLMIPSPRHRSIPVPPTHPSGDRHVASGSYDPTEYPKLATGIEKRGEEEEEKEVLQSSLKPLKAKTTKAERRALQEAQRAAKAASKDEGSKAVA

SEQ ID NO: 280251 - protein, 44 aa, Glycine max
  Clone ID: PAT_MRT3847_9508C.1.pep
FEKNVTTIIALRINYQKYSCLFTSTVLTIFSISYNWVTTQAWPW

SEQ ID NO: 280252 - protein, 63 aa, Glycine max
  unsure (1)..(63): unsure at all Xaa locations
  Clone ID: PAT_MRT3847_95090C.1.pep
AXHNYXHXXFXELNMNRXKVXLPCDXGXXXXMXXEXPXVXQXXXXXIXVXXQAIXPKXEXAXX

SEQ ID NO: 280253 - protein, 66 aa, Glycine max
  Clone ID: PAT_MRT3847_95091C.1.pep
CCQHFVFYWWGPCASALYARVKCPCASSSASLIVSPLVCKFHAASAPAYYLIESILSQPFRVGGSP

SEQ ID NO: 280254 - protein, 91 aa, Glycine max
  Clone ID: PAT_MRT3847_95092C.1.pep
KTRVQMLNPLLLHDLWRKEAQKCRPSLTILRQKKIEGSSRCIERQLRSLAQSCYITLLPARKLFYMMISLPEPNYGELRDINIRVFHIYLS

SEQ ID NO: 280255 - protein, 78 aa, Glycine max
  unsure (1)..(78): unsure at all Xaa locations
  Clone ID: PAT_MRT3847_95093C.1.pep
PNFPLQSVLDILSIVAEPRNPPPVSRPVIVFGWEGKEYLNEEVXEKRGLTXYDNRVKKVQASVGFQISLSRLILVRFV

SEQ ID NO: 280256 - protein, 100 aa, Glycine max
  unsure (1)..(100): unsure at all Xaa locations
  Clone ID: PAT_MRT3847_95094C.1.pep
KGGGVPESVISSSFPRGAAAHSRGGNKGAFAIGPVKMARKKFPIAAKAGGGLGFPWLARFGGKEXREATGGPLDGIEKGRGPFFSLIFFFGAECDLNYMI

SEQ ID NO: 280257 - protein, 77 aa, Glycine max
  unsure (1)..(77): unsure at all Xaa locations
  Clone ID: PAT_MRT3847_95095C.1.pep
FFFLFLGISLEIKSGFFFLKLKMNDPVTTWVPHILCPICHRWVTIXYIYIYNPFSCPVLINTICSLFLSFLAATIFT

SEQ ID NO: 280258 - protein, 329 aa, Glycine max
  Clone ID: PAT_MRT3847_95096C.1.pep
SSEIDLVPSENEVQPGEDFQQNSPKKKRCKLEPAGEGESCKRCNCKKSKCLKLYCECFAAGVYCIEPCACHDCFNKPIHVETVLQTRQQIESRNPLAFAPKVIRSSDSVSEIGDDPNKTPASARHKRGCNCKKSSCLKKYCECYQGGVGCSISCRCEGCKNAFGRKDGSAPVGIETDPEETEASDKGMVEKTLQKTEIQNTENHPDSATVSTPLRLSRPLLPLPFSSKGKPPRSFVTTISGSALFANQKLGKPNPLWSQAKHFQTVPDEEMPDILQGDSSPITCIKTSSPNGKRISSPNCDLGLSPSRRGGRKLILQSIPSFPSLTPHP

SEQ ID NO: 280259 - protein, 118 aa, Glycine max
  unsure (1)..(118): unsure at all Xaa locations
  Clone ID: PAT_MRT3847_95097C.1.pep
IHRDIKSNNKGHDANLEARRGELRGERRMIRKNEKDNMMDGXYGYIERENGENRKVEEKIDIYRYREGHIELLSGETAVDTWLEESIDIVEWIRKKRRMNNWEEALEPAIDSDGEQDK

SEQ ID NO: 280260 - protein, 137 aa, Glycine max
  Clone ID: PAT_MRT3847_95098C.1.pep
LHQASKIRTLVSSLSSSSDQTRLAALRHLRRTSAEDPAARPLISAAGAVPLLASALYSPSHPIQDHAAATLLNLSISDRRPLAASPDLPDALAHLLSRHATSSAASAVQCAAATLHRLLAVDSEIRPIITSKPDIIR

SEQ ID NO: 280261 - protein, 79 aa, Glycine max
  unsure (1)..(79): unsure at all Xaa locations
  Clone ID: PAT_MRT3847_95099C.1.pep
PKKRGAFTIDYXTSXKVAGFIAETIXGAGGAGELAPGYLKLVYDIGHKAGGICIPEERHKGXARFLNHFWGENKRLFFF

SEQ ID NO: 280262 - protein, 113 aa, Glycine max
  Clone ID: PAT_MRT3847_9509C.1.pep
MQGIKLGFTIMLVVAGIVAVPRISGQVCNGNLGTIQEECEEYYKPGGPTIPPSTECCNALRNVDVPCMCRLANNFQSYFSGGKVVYTLRQCGKDVPPGTTCGGYRAPPASTQV

SEQ ID NO: 280263 - protein, 125 aa, Glycine max
  Clone ID: PAT_MRT3847_950C.1.pep
IELVLYRALTVEIGIGINGITISTIQSICSCCATHIASLSSAYVITCKCLTRWLEVVKTRSSRIHSISRLYSLTFQYTLVCLLYLLSHSPIPAYCSHTLPNVCLLLSRIAQYIAFFVVYATFCCL

SEQ ID NO: 280264 - protein, 70 aa, Glycine max
  Clone ID: PAT_MRT3847_95100C.1.pep
KASLSHIFKDPTIHCSAQCLQVKDTTSRQVLHTSAGQLSKHRSVSSRTGPSLYPLWLPLVMALVLVFRLV

SEQ ID NO: 280265 - protein, 52 aa, Glycine max
  Clone ID: PAT_MRT3847_95101C.1.pep
RLTFSAHCLVEYSFYIYDIVKLSNQTVGRMISAPPISQIVASHQLQSQRTRG

SEQ ID NO: 280266 - protein, 51 aa, Glycine max
  unsure (1)..(51): unsure at all Xaa locations
  Clone ID: PAT_MRT3847_95102C.1.pep
PSRYEITQLPVFGEWSPPKINXGKHLGLEACAKLSKIIRSCLKKVGLDSQE

SEQ ID NO: 280267 - protein, 458 aa, Glycine max
  Clone ID: PAT_MRT3847_95103C.1.pep
MDFTSTVAPTRPPTRPPRVRPRVRPRVLLKPIPRRYLSLTHTVSSSCYSFLVMESRVLSRAGTLSSLPHLRKPPREAVSSASLVAVKAVGSVADGGNLIWGRQLRPELCSPVLKKEAVLLRPCLAAASSPAEGSDSAGEAKVAPAGFFDKYPALVTGFFFFTWYFLNVIFNILNKKIYNYFPYPYFVSVIHLFVGVAYCLVSWAVGLPKRAPIDSNLLKLLIPVAVCHALGHVTSNVSFAAVAVSFTHTIKALEPFFNAAASQFILGQSIPITLWLSLAPVVIGVSMASLTELSFNWVGFISAMISNISFTYRSIYSKKAMTDMDSTNIYAYISIIALIVCIPPAVILEGPTLLKHGFNDAIAKVGLVKFVSDLFWVGMFYHLYNQVATNTLERVAPLTHAVGNVLKRVFVIGFSIIVFGNKISTQTGIGTAIAIAGVALYSFIKARMEEEKRQAKAA

SEQ ID NO: 280268 - protein, 72 aa, Glycine max
  Clone ID: PAT_MRT3847_95104C.1.pep
KVPFFNPTKLFTFFFGPGKFNLQSPPPLVKEGFFVLPKGMFLGLTMPPGPIFGLSYPCLPRFCFFFGAPKFN

SEQ ID NO: 280269 - protein, 75 aa, Glycine max
  Clone ID: PAT_MRT3847_95105C.1.pep
KELGLLLRVISFSLLDAVFPTLDQSFSVVGYSKYSSKSRTTWNACSKSLSLLDAMISLGLYCISSTPVYQTLTKP

SEQ ID NO: 280270 - protein, 68 aa, Glycine max
  unsure (1)..(68): unsure at all Xaa locations
  Clone ID: PAT_MRT3847_95106C.1.pep
PGPPPPPAPPPPAPPPPCPPPLTTPXSRFPPSSPKPPFPCPPCLGPIVLFPWNVLKPRFPKGRGFPNL

SEQ ID NO: 280271 - protein, 66 aa, Glycine max
  Clone ID: PAT_MRT3847_95107C.1.pep
EEVKARYPHVLYAELYHVAGVDPVEVTGGPSMDSLPGITLHCYILMMGVFLMPNIIWTDRGRQKID

SEQ ID NO: 280272 - protein, 67 aa, Glycine max
  Clone ID: PAT_MRT3847_95108C.1.pep
HTLPARAKRKIPSLGERWRGRTRFCRWKQPSSPRASHLERRPKAKTTAEAYQKPAPAPLFDPPEFTY

SEQ ID NO: 280273 - protein, 141 aa, Glycine max
  unsure (1)..(141): unsure at all Xaa locations
  Clone ID: PAT_MRT3847_95109C.1.pep
YFFFFFFFFFFFFWGPRHPQSHQNVLPYXYFYFYLILGYIYNPIMGLYKIIISHILLIHTWAQATFFAKGFPFGICWAGPRIKVPDSEIQLPPPFIGGGGQGSPIDCFRLETDKWPNFLVGCETPRSDLPLFIERGLAFPG

SEQ ID NO: 280274 - protein, 63 aa, Glycine max
  Clone ID: PAT_MRT3847_9510C.1.pep
HPYYYYYTTWFHHQSTMVLTSSPTHSSTRFVRLPSFLHSNHRLAFVRRVRYNLSHPNLHNLTI

SEQ ID NO: 280275 - protein, 76 aa, Glycine max
  Clone ID: PAT_MRT3847_95110C.1.pep
HPPIGDCITLICYERELLIDVFETTYDHFLNAACQCLFDCAASCKMNGTRMEQELREENPRLGEDESTRNSPPQEA

SEQ ID NO: 280276 - protein, 240 aa, Glycine max
  unsure (1)..(240): unsure at all Xaa locations
  Clone ID: PAT_MRT3847_95111C.1.pep
MAVRSALSFTNTIRTFPLHTHRLSFSFSSKLTCSRSSLKDDQQTDSCSSNTTTVSVAPENDSETQQQEMDWKSDEEFKKFMGNPSIEAAIKLEKKRADRKLKQLDRETTNTNPLFALFNNLVRDNLLNEKERLQKAEQTFQALDLNQLKSCFGFDTFFATDVRRFGDGGIFIGNLRKPIDDVIPKLEKKLSEAAGREVVVWVMEEKANDITKQAWLWGQPKAEXDLQFESTKLSTPLGYF

SEQ ID NO: 280277 - protein, 76 aa, Glycine max
  unsure (1)..(76): unsure at all Xaa locations
  Clone ID: PAT_MRT3847_95112C.1.pep
SSVIFIPSTLSLXHGHLHPSSSFSLHGHQHTFCASLLWNHPHPLHAFVLQDHPHPLHAXFPYDSLQGHRHAFCAFL

SEQ ID NO: 280278 - protein, 608 aa, Glycine max
  Clone ID: PAT_MRT3847_95113C.1.pep
MDGKKLEYKGEEALKEIERLTMKAAEVQEGLLKQILTQNRETEYLSKYMRGEKNITDVAEFKRCVPVITYERIFPYIQRIANGEDSTLITSHPITEMLCSSGTSAGEPKMMPSIVEDLERRTFVYNLITPIINQYVSDLDEGKAMYLYFVKAEMCTPCGLPARTVLTSYYKSKHFKCRTHDPWNDYTSPDQTILCNDSNQSMHCQLLSGLVHRRHVLRLGAVFASALLRAISFLERNWRHLCEDIRTGQLSSFITDPSCRSCMSTLLSSPDPRLADEITRICSQKSWKGILCQLWPKAKFIEAVVTGSMAQYVPALKHYSDGKLPLVCTMYASSECYFGVNLKPLCDPGDVAFTLLPNMGYFEFLPLGHNGTLLMDFDEGEQVPNDKLVDLVHVKLGCFYEPVVTTFAGLYRYRVGDVLQVVGFYNNAPQVRFICRRNVVISVDTEKTNEEDLHRGVTMAKKLLEPYDALLVEYTSYPDTSSIPGHYVLYWEILHCGIKTTESSQQLQLLDANVLEECCIAVEEQLDYVYRRCRSYDKSVGPLEIRVVEPGTFDALMDLFISQGASINQYKTPRCIKSKKALKLLKSKVTASFFSPRDPKWSPKMCST

SEQ ID NO: 280279 - protein, 34 aa, Glycine max
  Clone ID: PAT_MRT3847_95114C.1.pep
QNERHLSNKQQYNRDAHILNWISFEEKYHLVQLL

SEQ ID NO: 280280 - protein, 60 aa, Glycine max
  Clone ID: PAT_MRT3847_95115C.1.pep
RRLPSGRWKLRLKACRTANSSHEGNQRHVPLGGPGPLLLAIEPSVGARVGSSPHSDLQAF

SEQ ID NO: 280281 - protein, 57 aa, Glycine max
  Clone ID: PAT_MRT3847_95116C.1.pep
GMCVHEGKANRRGCMGLMLSTLPSSSEEPLFHYLAEDTELGMYYLKGSCPQAEYILN

SEQ ID NO: 280282 - protein, 114 aa, Glycine max
  unsure (1)..(114): unsure at all Xaa locations
  Clone ID: PAT_MRT3847_95117C.1.pep
GVSENQYAIVASFFGMPXDRKGGRAGITEVHFLPFNPVDKRTAITFIDNNGDWHRSSKGAPEEIIELCGLKGETGKKAHTVIDEFADPTLRYVGVSLQTDSEKSMDTANYALKK

SEQ ID NO: 280283 - protein, 73 aa, Glycine max
  Clone ID: PAT_MRT3847_95118C.1.pep
PRIRLKIRTFISSYNTPNKPAYFVKLTGPHPKHFILQLSFSQLHIKNPTLIKSTHSFLSNNLTYLTISIIKFS

SEQ ID NO: 280284 - protein, 29 aa, Glycine max
  Clone ID: PAT_MRT3847_95119C.1.pep
IFLGLIKVYLELRPNNIICHLTKSQKIQV

SEQ ID NO: 280285 - protein, 236 aa, Glycine max
  unsure (1)..(236): unsure at all Xaa locations
  Clone ID: PAT_MRT3847_9511C.1.pep
LFLLSLYLVIGIASGVQTKTFHLQRKLQHGTPECLLPQSRKEKGAIILEMKDRGECSESERKGDWVEKQLVLDGLHVRSIQNHIRKRTSSSQIADSSETQVPLTSGIKFQTLNYIVTMGLGSQNMSVIVDTGSDLTWVQCEPCRSCYNQNGPLFKPSTSPSYQPILCNSITCQSLELGACGSDPSTSATCDYVVNYGDGSYTSGELGIEKLGFGGISVSNFVFGCGRNXKGLFGGA

SEQ ID NO: 280286 - protein, 70 aa, Glycine max
  Clone ID: PAT_MRT3847_95120C.1.pep
KLPSTKKCLGYRIKSERTRSFHEYIAKTRSSLMRIATKKAFGMRVHPYWRETYTRRRTSTNPSGWTTKIC

SEQ ID NO: 280287 - protein, 138 aa, Glycine max
  unsure (1)..(138): unsure at all Xaa locations
  Clone ID: PAT_MRT3847_95121C.1.pep
DSWVSGQTFKYDIIGAVSHSLEDFAEKEDHEKPKMMDARLRQRIYPQCNEVHAQMETNMVKWSLDDDETPKGSMLDLKISQCKIALPKNTVGGTILRIDLLAKLLTDGNTRASVALLRTHRIEGMIXMAATVGITENT

SEQ ID NO: 280288 - protein, 165 aa, Glycine max
  Clone ID: PAT_MRT3847_95122C.1.pep
SQLASSLALGSTAARRRQKGSYVRFLAREADESRLREVCESFLGPPTGMVEETSSDSKNLAWDPMVLGMRKHKLLREDILPSMASNRKVQRLLNEFMDLLSEYEIIDANQEQSNPTVPKSSLPETNPIESSSLATDQEHTAPPKLDHNTTTAKRANKFMNALLRW

SEQ ID NO: 280289 - protein, 112 aa, Glycine max
  Clone ID: PAT_MRT3847_95123C.1.pep
RAEAEFREMSQGICELLWLNIIFEDLKVNWDETMTPHRHGWSAINIAQGRVQFDISKHIEGEGCFIKEKLHSGLICTPYGPTGGQLANILTNGLNRRRCKRLLSGLGGENAH

SEQ ID NO: 280290 - protein, 80 aa, Glycine max
  Clone ID: PAT_MRT3847_95124C.1.pep
LCSAALSPAPRARACREAASLGWASAAGFRCSRFVFCLLLAFSVFLRFVLCPLLRAAPAPLSARFALFAWPRACLALLGP

SEQ ID NO: 280291 - protein, 58 aa, Glycine max
  Clone ID: PAT_MRT3847_95125C.1.pep
YIESGEIKVKYAIVIGGATFGCSSSREHARVALGASGAAAVVADSCATIFFRDSVETG

SEQ ID NO: 280292 - protein, 56 aa, Glycine max
  Clone ID: PAT_MRT3847_95126C.1.pep
RVRFCLKEGKWKVDKLGSRMRIFYFIILEVSLNSPPPPQLAQDIFVFCYNEFERMS

SEQ ID NO: 280293 - protein, 121 aa, Glycine max
  unsure (1)..(121): unsure at all Xaa locations
  Clone ID: PAT_MRT3847_95127C.1.pep
WESWPHRPGPARTTEATHPSGCDSIFFAGIFFFCCAWACLFSHLNRPCSGGNCGCESACKCGNSCRRCKMYPDLSYTETATTEDLGMGXAPVRAHSKRPEXGGPHENDGCQWRANCTRNPW

SEQ ID NO: 280294 - protein, 106 aa, Glycine max
  Clone ID: PAT_MRT3847_95128C.1.pep
LTSWGPPQWGGKLGPPLGLARFEGETVAFIKKPITHWFYFRGNGGQPWFFIWFPNTHLNFDAPDKQLPEPTGLALFLPGGGYHRGEKRRKGDCPGGKDCCPNRRRR

SEQ ID NO: 280295 - protein, 51 aa, Glycine max
  unsure (1)..(51): unsure at all Xaa locations
  Clone ID: PAT_MRT3847_95129C.1.pep
GSTYTTXICMRLRGHLYVSEFTSLCDDXGDMQKSRXYFXXCCMQGHXXTVS

SEQ ID NO: 280296 - protein, 66 aa, Glycine max
  Clone ID: PAT_MRT3847_9512C.1.pep
SRKKIHRDKDAEPTEFEESVGQALHDLENTNQELKSDLKDLYINSAVQVDVYGNRTDVVIHVPYRL

SEQ ID NO: 280297 - protein, 39 aa, Glycine max
  Clone ID: PAT_MRT3847_95130C.1.pep
HNNFGVLFHIRRVLFRPRACQFSQRRVCIFPSVSKHHQT

SEQ ID NO: 280298 - protein, 137 aa, Glycine max
  Clone ID: PAT_MRT3847_95131C.1.pep
AGKERTSFKCKQDKIPNMQTNYSKSNGGMQKIQTQQLKPHKQVSPHYTVKGNPSHPDTEMAKFTRSHDPETEAWNQNVNPKKTEQQNTKQKVSKQCTFTRECVKERERERVLGFFFRARRWDIVGIGRGVEAGNSGP

SEQ ID NO: 280299 - protein, 96 aa, Glycine max
  Clone ID: PAT_MRT3847_95132C.1.pep
VILDHFISISVYIRLKELGPSEFNLDSFYNYNADASTKTIQHLWYRVIAYSIDYMFLPIGVGHASIMIIECTFIKSLTQLIGYFTHSRCLCYGILG

SEQ ID NO: 280300 - protein, 106 aa, Glycine max
  unsure (1)..(106): unsure at all Xaa locations
  Clone ID: PAT_MRT3847_95133C.1.pep
VAXTXTXARNSARXLKWFXLXERXFXXEQGEXXVNXRSXLXMXTTGNANXXXXXXXGDLXALXXESXSWXXKAXIPXSSVQKXXLXFRXLGXXXXXLXXXLQPTAX

SEQ ID NO: 280301 - protein, 63 aa, Glycine max
  Clone ID: PAT_MRT3847_95134C.1.pep
QTLCFPAGANSKFMGEKLLTTPNNDFDADQLMFKDPGLLPKATSLHEGETSVTEDYQLAASSS

SEQ ID NO: 280302 - protein, 54 aa, Glycine max
  Clone ID: PAT_MRT3847_95135C.1.pep
VKVGKTLLYIVTAMGRVIRAHRKGAGSGLQGLHAPQKGPCPHPVPGYTESRKRL

SEQ ID NO: 280303 - protein, 71 aa, Glycine max
  Clone ID: PAT_MRT3847_95136C.1.pep
LEIFPGESFSLFLDPPKFLPLVIFLNVFFNMHFVSRFQTFHQEFKGFLPLAFFWGKFSYWSYYEYIQNNIK

SEQ ID NO: 280304 - protein, 95 aa, Glycine max
  Clone ID: PAT_MRT3847_95137C.1.pep
QITRGGTWVSNSKAHKLNGNSAPVPKNISFNGGGAPLETFLGDNGVAPFQITGNQTWSMVFSTTLKTRMGGLGPLIKGGWPTGNKFRVFCIWGEG

SEQ ID NO: 280305 - protein, 72 aa, Glycine max
  Clone ID: PAT_MRT3847_95138C.1.pep
FLPSQDDMGTGVPLRALVPLSPLGHLPLPLPPVPFLPSGPQVPNPHVMVPNAPLGPLGLLIPPVFTWCFVPW

SEQ ID NO: 280306 - protein, 43 aa, Glycine max
  Clone ID: PAT_MRT3847_95139C.1.pep
TTRPTTLPPTLSLTRTRKNNSQIALTKASQHKLDRTISTIIRF

SEQ ID NO: 280307 - protein, 39 aa, Glycine max
  Clone ID: PAT_MRT3847_9513C.1.pep
VRDSLLEGPACIQKYLLQCMWINCTLCFYGEKGNPYLYK

SEQ ID NO: 280308 - protein, 95 aa, Glycine max
  Clone ID: PAT_MRT3847_95140C.1.pep
ARGDNQLVPYYAVFLGALSPWAADAEEKLRVAATETNEELRALKGDPPDANDVRAVLSIGRRQLSRELEATPIEALHWISPLPKQWSHCGKATTE

SEQ ID NO: 280309 - protein, 144 aa, Glycine max
  Clone ID: PAT_MRT3847_95141C.1.pep
VRHFPLDELELASLRGTVQRAEIQLNLQKRRGHGVLSVLKPKFSGVLGEALDVAARWSGDVITIEKTVLQQNYSCYELQGEYVLPGTRDRNPVDKEGGLIKRLMSGHIGNAISSMGRWRMKLEVRRAEVAEMLPLARLLSRSMD

SEQ ID NO: 280310 - protein, 97 aa, Glycine max
  Clone ID: PAT_MRT3847_95142C.1.pep
RHFDACKWPTSDPHFWELIFPIEVCGPNNGFDMWGYEWANQTSWHLSFLIDNPKQYTVFDILLGISQDFGIGGNNIRPAFYVPQATARCYANAESSA

SEQ ID NO: 280311 - protein, 110 aa, Glycine max
  Clone ID: PAT_MRT3847_95143C.1.pep
DTRPSTRCTTPLEIPPPQKLRSNTLTQSQRLHHIPNKPVVDENRHERSFVTSFCNVNNDTSDPLATPIQSRSNREHTRLSYKAWTREQGLLVCCYSYSKTLVWEEGELKG

SEQ ID NO: 280312 - protein, 63 aa, Glycine max
  Clone ID: PAT_MRT3847_95144C.1.pep
CCVLSQIACTLRVSLREYGHNRQCSLGECTSGWSGIVVLLMSWFGRIEPSFLSLHCLCFSRPA

SEQ ID NO: 280313 - protein, 152 aa, Glycine max; identical to SEQ ID NO: 158042
  Clone ID: PAT_MRT3847_95145C.1.pep

SEQ ID NO: 280314 - protein, 152 aa, Glycine max
  Clone ID: PAT_MRT3847_95146C.1.pep
MSTPARKRLMRDFKRLQQDPPAGISGAPQDNNIMLWNAVIFGPDDTPWDGGTFKLTLQFTEDYPNKPPTVRFVSRMFHPNIYADGSICLDILQNQWSPIYDVAAILTSIQSLLCDPNPNSPANSEAARMFSENKREYNRKVREIVEQSWTAD

SEQ ID NO: 280315 - protein, 98 aa, Glycine max
  Clone ID: PAT_MRT3847_95147C.1.pep
RGLSLIEKLLENLFYESLLTLMNRTRTEADSQTAKRAGNVDPQNDKPNIGLVEGTHIPLLIKKICLPGDAHHFRYVAKIIQVYMEAKAYQKLNISLDW

SEQ ID NO: 280316 - protein, 458 aa, Glycine max
  Clone ID: PAT_MRT3847_95148C.1.pep
LVNVLKEKKIGVVAHFYMDPEVQGILTAAQKQWPHIHISDSLVMADSAVKMAKAGCQFITVLGVDFMSENVRAILDQAGFSEVGVYRMSNEQIGCSLADAAATRTYMEYLTAASRSTSLHVIYINTKLETKAYAHELVPTITCTSSNVVQTILQAFAQVPDLSIFYGPDSYMGANIKDWFQQMTKMTDEEIAAIHPEHSQDSIRSLLPRLHYFQDGTCIVHHLFGHEVVEKIKEMYCDAFLTAHLEVPGEMFSLAMEAKRRGMGVVGSTKNILDFIKDRVQEALDRNIDDHLQFVLGTESGMVTSIVATVRSLLEPVKSSSERAKVTVEIVFPVSSDSISTTTSSLSSGLQTAKVGDIILPVVPGIASGEGCSIHGGCASCPYMKMNSLGSLLKVSNHLPDEENILSAYKAERFKLQTPNGRSVADVGCEPILHMRNFQATKKLPEKLVDQILRPQHS

SEQ ID NO: 280317 - protein, 70 aa, Glycine max
  Clone ID: PAT_MRT3847_95149C.1.pep
SIAFPIFDLHFELPCCAVLELVTTNEKPDFDRELEIVCRALQACFYFSSVTSLSALFACLTTSHVESDGI

SEQ ID NO: 280318 - protein, 78 aa, Glycine max
  Clone ID: PAT_MRT3847_9514C.1.pep
CFRTIRMRGRLSNFLDHKMMAVLFAIIVNHVGAGDNYTMPIYIETRARPCHIHCGLRVLFPFASLQLLMSKQGNHDSV

SEQ ID NO: 280319 - protein, 52 aa, Glycine max
  Clone ID: PAT_MRT3847_95150C.1.pep
GCMYWKKPCLWKIKCFHCHKLNICNGNFVLKNFNYIIIWGLSYQHPSKYMTN

SEQ ID NO: 280320 - protein, 92 aa, Glycine max
  Clone ID: PAT_MRT3847_95151C.1.pep
DNLITHAMLRQLQYYKGRPFNRTLLDYLQKKLTLSFAILHQAFALPNFYKLRTWKNPGFAHLNHLTDNPIFQCYALCNKAFTDGLAQHTPTL

SEQ ID NO: 280321 - protein, 124 aa, Glycine max
  unsure (1)..(124): unsure at all Xaa locations
  Clone ID: PAT_MRT3847_95152C.1.pep
ICAGASAGGSSTPDGEFNPYEELSASPIEKFDVAPAAYASSXKEVDMNGDEATASRLAKAYDKLMMGQSSNQLKGVTLGSLNASKEIQYADKLPVIPWVPRLTKSRLNDMRIDLARSAVFTAWI

SEQ ID NO: 280322 - protein, 38 aa, Glycine max
  Clone ID: PAT_MRT3847_95153C.1.pep
LNLSLIPYATSPAFYMWCRRLCDQSTTPHLLKFDPLLI

SEQ ID NO: 280323 - protein, 63 aa, Glycine max
  Clone ID: PAT_MRT3847_95154C.1.pep
FFKDKKKKKKKKKKKKKKKKKKKKKKKKKKKKKKKKKKKKKKKKKKKGGAFLKNQILLTLDCK

SEQ ID NO: 280324 - protein, 41 aa, Glycine max
  Clone ID: PAT_MRT3847_95155C.1.pep
YTAILFIQFHLVKTNVNNCVEGLSTYHQLHCVIKIKHKLIV

SEQ ID NO: 280325 - protein, 75 aa, Glycine max
  unsure (1)..(75): unsure at all Xaa locations
  Clone ID: PAT_MRT3847_95156C.1.pep
KGTNFNVIIGMVLGGVPQLSWSIAPVTYYNPILKPGTEKFMXTLKNTAFHGLVLQMFPLEETEPLRPEPKKHGIE

SEQ ID NO: 280326 - protein, 38 aa, Glycine max
  Clone ID: PAT_MRT3847_95157C.1.pep
FKSAITTLDNSLARSVGHLQILVISYLNGKPFSPLLAA

SEQ ID NO: 280327 - protein, 75 aa, Glycine max
  Clone ID: PAT_MRT3847_95158C.1.pep
TKRPRARHALGTRRSIRLLVRAYILGGNCENDTGGTDSNRLTRQAGLRHFHWPERQAYALREAKFEYHDLMILEN

SEQ ID NO: 280328 - protein, 58 aa, Glycine max
  Clone ID: PAT_MRT3847_95159C.1.pep
YPGRATRAPTRPREDDRRGSHLILATTLLFFSKLPVLLNGDSILVLFKELMRFHKMGM

SEQ ID NO: 280329 - protein, 127 aa, Glycine max
  unsure (1)..(127): unsure at all Xaa locations
  Clone ID: PAT_MRT3847_9515C.1.pep
RSPSPLRSPPLSPCFFAAVFFACRLLLLXSLFPASLRRLLLGSPSLSPLAPPRGVLLSFASSRCGRPWWWLVRVLCLWFPAFVFFGGPAGVVCLPCLVSRRFLPRLPPPLXLFSCLPPPXFPASVRV

SEQ ID NO: 280330 - protein, 38 aa, Glycine max
  Clone ID: PAT_MRT3847_95160C.1.pep
APQPPYIKSFLHHLKSIYSKRAHAYCINTISSIPGTLL

SEQ ID NO: 280331 - protein, 66 aa, Glycine max
  Clone ID: PAT_MRT3847_95161C.1.pep
MGDEEVFAGASGLRRAVELIFSVLSLSHSIRVFAGKWQLIRAKLEERHGGLIAAENCDSGDSRRCR

SEQ ID NO: 280332 - protein, 85 aa, Glycine max
  Clone ID: PAT_MRT3847_95162C.1.pep
LQRFGSRHDIPKPTEHFDLIAGTGTRGLIAIMLGRLRLDLETCKDVYVRMTKRVFETDKTIAGIPYRSTLFKASKLEEAIRECVR

SEQ ID NO: 280333 - protein, 127 aa, Glycine max
  unsure (1)..(127): unsure at all Xaa locations
  Clone ID: PAT_MRT3847_95163C.1.pep
LLLAMSNLKLGVEVVGAHDLMPKDGQGSCSTYVELHFGGQKFGTTTKEKDLNPVWNEKFYFNVTDPSKLQNLTLDACIYHYSKSNNSKVFLGKVHLTGPSFVPYADAVVLHYPLEKKXVFFRIKGEL

SEQ ID NO: 280334 - protein, 197 aa, Glycine max
  Clone ID: PAT_MRT3847_95164C.1.pep
LLAMSNLKLGVEVVGAHDLMPKDGQGSCSTYVELHFDGWKFRTTTKEKDLNPVWNEKFYFNVTDPSKLPNLTLDACIYHYSKRSNSKIFLGKVHLTEPSFVPYADAVVLHYPLEKKNVFSRIKGELGLKVYVTDDPSVKSSNPIHDVEPSVDTVQHSTPDQSPVSFTNSILNVFSRKKNETKHTFHTLPNSNEEKQR

SEQ ID NO: 280335 - protein, 131 aa, Glycine max
  Clone ID: PAT_MRT3847_95165C.1.pep
YKGFFLPPKNIVCPFNGGFPSSLFFLMGPNSLFFFPHYPGFQGPAFFFFFYGGHFLFHRGFKKKKWVFFLVRFLLGSKQFFFFVLGPGVFILVLAKFWSFFWPILGCFLKNIWAFLFQGTFIQQSCRTKNL

SEQ ID NO: 280336 - protein, 73 aa, Glycine max
  Clone ID: PAT_MRT3847_95166C.1.pep
LVLYWSSYTHTRFCTVYPLMRVFLPRSRTILPFSEYCKYPSSRSAPRSFWIFFCPDGCFPIHFVVCSCIVIEN

SEQ ID NO: 280337 - protein, 94 aa, Glycine max
  Clone ID: PAT_MRT3847_95167C.1.pep
WIPPVLCHNFFTSLPLSFPLESLAPFTMSLQVGPALASSVYWVLFDVLCTMVGAKVAVKFFTAFTPFVMLAIKSLPRFNSGLFDWCYTMSQLYG

SEQ ID NO: 280338 - protein, 63 aa, Glycine max
  unsure (1)..(63): unsure at all Xaa locations
  Clone ID: PAT_MRT3847_95168C.1.pep
TXQXXIXXCTIXFPXVRYXDLXVLLWXXXYLMXXGNEXEXNHLLYLIYHXSSLQTEXYEYSDY

SEQ ID NO: 280339 - protein, 140 aa, Glycine max
  unsure (1)..(140): unsure at all Xaa locations
  Clone ID: PAT_MRT3847_95169C.1.pep
EIPGPTTPFRLIKTRGIKIKVLVFFVVPMGGAWNCLPSNLFLFQMNTGFGPRPPEVNCPSXRFVGKQHTIFGFETILEKCFEPPKDSILGDHFISDSKPVNQQVYFIAKDLEVLPKATFLLQLIGTVLFNIPSSKNTCFG

SEQ ID NO: 280340 - protein, 139 aa, Glycine max
  Clone ID: PAT_MRT3847_9516C.1.pep
MAFLYGAQRLLRHTPLVHSHYASIRLSSTLTSPKLFVSGLSRLTKDENLKEAFSSFGQLVEAKVITDRASGRSKGFAFVTYTTIEEAERAREGMNAKFLDGWVIFVDPAKPREPRPPQQSQSQPSEIGFTVNKTVGWCG

SEQ ID NO: 280341 - protein, 100 aa, Glycine max
  Clone ID: PAT_MRT3847_95170C.1.pep
GLISPVLCSCDVLLLLLTGIFQQYLVYQVQKIRLQGYYSFSQKLKFIVRIPFAITAYGTAAMLLVIVWKPYTGFLSISAILRYILHLVIFVHFKHFSRID

SEQ ID NO: 280342 - protein, 389 aa, Glycine max
  unsure (1)..(389): unsure at all Xaa locations
  Clone ID: PAT_MRT3847_95171C.1.pep
MAPETEPSPPATSPEENALFLDILHEAPLFAHRKAARVIGSVFYCILLAGYATLAIGAHWIFRPVQGLISPVLCSCDVLLLLLTGIFQQYLVYQVQKIRLQGYYSFSQKLKFIVRIPFAITAYGTAAMLLVIVWKPYTGFLSISAILRIIILXEAVSAVCFMSLYIGYIHQYNSLNSHPDVLKSLYSPLQPSSSLEGLRYHDGRLSDQQMALLQYQRENLHFLSEEILRLQDCLSKYEGTDDRSTPQVDLAHLLAARDQELRTLSAEMNQVQSKVRLGPSLFAGPDSRIQQISKDYNQSLEDSETRLPILGERCTLGANLLLAYKGDLQRQDGNHIHHLNQSNMELYSLAGKYGTCPVRVEPFTVFSQVKRTCNRHYCREIQCTHISFK

SEQ ID NO: 280343 - protein, 166 aa, Glycine max
  unsure (1)..(166): unsure at all Xaa locations
  Clone ID: PAT_MRT3847_95172C.1.pep
MATDRYASPPATSPEENALFLDILHEAPLFAHRKAARVIGSVFYCILXGYATLAIGAHWIFRPVQGLISPVLCSCDVLLLLLTGIFQQYLVYQVQKIRLQGYYSFSQKLKFIVRIPFAITAYGTAAVLLVVVWGRYTGLFXISAILRIIMGGGAVSATNFIYLYDE

SEQ ID NO: 280344 - protein, 68 aa, Glycine max
  Clone ID: PAT_MRT3847_95173C.1.pep
LELRTKRGDTPTNVSDQCPCDTPKSCKIKESQNYSRMDTLETSHDSYHENILESIKTEIEIQYELSVA

SEQ ID NO: 280345 - protein, 116 aa, Glycine max
  Clone ID: PAT_MRT3847_95174C.1.pep
KRTQEISHQIRKHNMGLWVREYNIHRNREININTLRLKTQQTHTHTPCSREMHHRPIIIHVMATPSITTTTKSSLHNRRISLPPSCLGVHTSHDWKEKIKKSDFFFCIVWLRSGRG

SEQ ID NO: 280346 - protein, 341 aa, Glycine max
  unsure (1)..(341): unsure at all Xaa locations
  Clone ID: PAT_MRT3847_95175C.1.pep
MERKQGFFSALKDEVVRGLSPARSRAKSPARSASPMSSLLRRRRKHYAPPPELFIARSGSLRPAEALSPLKEGPDGTDDGGHDSTRGEGRWGQWMKGPLARAPSVSSSSSSSCNNKKSDLRLLLGVLGAPLAPVHVCTTDPFPHLSIKDIPIETSSAQYILXQQYIAASGGQRLQNSINNAYAMGKVRMIASEFETANKVTRSRNSSKAAESGGFVLWQMNPDMWYVELALGGSKVHAGCNGRLVWRHTPWLGAHAAKGPVRPLRRALQGLDPRTTASMFINARCIGEKKINEEDCFILKLFADPSTLKARSEGPAEIIRHVXFGYFSQKTXLLCHLEGLH

SEQ ID NO: 280347 - protein, 88 aa, Glycine max
  Clone ID: PAT_MRT3847_95176C.1.pep
GSQGWWWAVTNIGNGLIIKGHRSFAAIITCRSARRFSLSEQANMGMWDLFPLLSLDARSQNQQVILPHKTGIGQGIAIQSNVKSSELH

SEQ ID NO: 280348 - protein, 238 aa, Glycine max
  Clone ID: PAT_MRT3847_95177C.1.pep
MWTRILARATRAVAVAGNYSLINQPISDPIFLKIPKSTFPQIFNNPRFLVTSNLDNELSPDSSVNGGDRQLAEQEEGGGGGDTYEVDSDTLESVLRLLQTSADGSLESCLDDMDLTLHQQLVTKITETPFVLSENLIRFFWWAWSERSLEVTTPMVESLVLAICGNDDVRKKKEVVYSLWDLVKEIGEKESGLLNVRILNELISSFSRLRKGKAALEVFDKFEAFYCVPDADTYYFTI

SEQ ID NO: 280349 - protein, 64 aa, Glycine max
  Clone ID: PAT_MRT3847_95178C.1.pep
VFCFVKPLALICHVYELSYKFLSLWQRNSAIFRYYSSMLFQVFCEIWNKSNDRNWCLVDEFNMN

SEQ ID NO: 280350 - protein, 98 aa, Glycine max
  Clone ID: PAT_MRT3847_95179C.1.pep
IYLNVSYFLFFYRMPCRVRGGGFLFMSTPPEGLKDLELDKRPPGGEPTERTFEDTTQPKQITRHREFANPPYKEHTVLVQAPQNQTLLKNPESGPPPP

SEQ ID NO: 280351 - protein, 42 aa, Glycine max
  Clone ID: PAT_MRT3847_9517C.1.pep
HIAGGPLNKVTNPIYPNNNFNPLSLTNNPEAFAKLKVKELKN

SEQ ID NO: 280352 - protein, 153 aa, Glycine max
  unsure (1)..(153): unsure at all Xaa locations
  Clone ID: PAT_MRT3847_95180C.1.pep
LYWRIFFRLLISNSITSSNPAFFSNSVKDILGTIPXFPSLTKNKLREQVVFDTLRGDWMVAFGNWEFDPLKLSNPFPDNRSSAHIWQGYEDKVVPSQIQRFVTQKLPWIQYHEVPDGGHLFVHYSGLCEAILKALLLGEENLSYRPRPEVFVS

SEQ ID NO: 280353 - protein, 53 aa, Glycine max
  Clone ID: PAT_MRT3847_95181C.1.pep
NYTSRHATNLGLDLFHVAKPLQSKVVLRRPDTLMIPCSCWTTAWMVRLWCREI

SEQ ID NO: 280354 - protein, 35 aa, Glycine max
  Clone ID: PAT_MRT3847_95182C.1.pep
SCQTQTASRVLTHLTSECSPRRVYPMDHMIYVLFK

SEQ ID NO: 280355 - protein, 70 aa, Glycine max
  Clone ID: PAT_MRT3847_95183C.1.pep
VRSSKLYRKVVLIYSFYSVGDIMFWRGEHSTQKFRSLSTLLVYWFATKVGINLQSVCSCFIRGNGMCSFS

SEQ ID NO: 280356 - protein, 246 aa, Glycine max
  unsure (1)..(246): unsure at all Xaa locations
  Clone ID: PAT_MRT3847_95184C.1.pep
MHLSKSFKHGVVFLLWFCCYLLHAAGHNNITDPGEVDALRAIKRRLIDPNGNLSNWEDRDPCTSRWKGALCFNETKVDGHLHVEELQLLRLNLLGTLAPDLGKLTYMKRLNFMWNNISGSIPNEVGNITSLELLLLNGNKLTGSLPEEIGYLPNLDRIQIDQNQISGPIPTSFANLNKTXHFHMNNNSLSGQIPPELSRLPNLVHLLLDNNNLSGYLPRELADMPSLLIIQLDNNNFEGNSIPDTY

SEQ ID NO: 280357 - protein, 143 aa, Glycine max
  Clone ID: PAT_MRT3847_95185C.1.pep
TSRFLFDNYTLIVSEYWDSKRLHQILADCGDEERKLSAVLEEDFLRLVPKAVLDWDYTSLLLLDRSDHAVPFNDMEIAGETMITQTVSDYAGTGMLVFTPTWELELTIARLSLQNMWGGLACLLIWTPHHNETLEDNTRRMGL

SEQ ID NO: 280358 - protein, 37 aa, Glycine max
  Clone ID: PAT_MRT3847_95186C.1.pep
VLPTFKIQALAYNYGVNLFGNLSSNMTTVNCSGRVLK

SEQ ID NO: 280359 - protein, 209 aa, Glycine max
  unsure (1)..(209): unsure at all Xaa locations
  Clone ID: PAT_MRT3847_95187C.1.pep
XXCPHVAGVASYVKSFHPHWTPAAIXSAIITTAKPMSKRVNNEAEFAYGAGQLNPRSAVSPGLVYDMDALGYIQFLCHEGYKGSSLSALVGSPVNCSSLLPGLGHDAINYPTMQLSLESNKGTRVGVFRRTVTNVGPAPTIYNATVRSPKGVEITVKPTSLTFSKTMQKRSFKVVVKATSIGSEKIVSGSLIWRSPRYIVRSPIVINNP

SEQ ID NO: 280360 - protein, 66 aa, Glycine max
  Clone ID: PAT_MRT3847_95188C.1.pep
THNHNKHSECLHCLRKYTASQMVKIMITPTTSLNIPHEQLVLRSYSLIYPRHSKPPTHCNSLTVTQ

SEQ ID NO: 280361 - protein, 50 aa, Glycine max
  Clone ID: PAT_MRT3847_95189C.1.pep
GLWKPTSPVGSTSNQVEKRSHGGDFPGDPVAMSYLATQPGGYKGVRSCVT

SEQ ID NO: 280362 - protein, 93 aa, Glycine max
  unsure (1)..(93): unsure at all Xaa locations
  Clone ID: PAT_MRT3847_9518C.1.pep
SMSKVLYPMEEYVTLGPAVRDGEHVFCVPLIFASFHDTFIHLICLSGMVPLVLFTGGMKVTADRDXSSPCAAMLASLDVAPLCLVLALTALLI

SEQ ID NO: 280363 - protein, 159 aa, Glycine max
  Clone ID: PAT_MRT3847_95190C.1.pep
KGRENLKGGSKSRARAPLNCFPRSCSPRRRVLGFFSSGGGRIFLPLVSPLCRGFSPGGRILNFVSSEGRIFLLFDSGFFPFPLVILGLGLWKPPVAEPVLGFPMFLMNFCGLTLMFSRAPALNKNLGARGFFFLGQIKCFCRRAPPLAKSFSGVLPVPF

SEQ ID NO: 280364 - protein, 75 aa, Glycine max
  Clone ID: PAT_MRT3847_95191C.1.pep
RLQKDTGGENNYNTFHSLGVGSIRFKLTYHILLTTISCMTIPIFNELADTIHRVNCKNHDMAQINPVRKHLIFAR

SEQ ID NO: 280365 - protein, 63 aa, Glycine max
  Clone ID: PAT_MRT3847_95192C.1.pep
STAHKKKKTKQKKKVVVSEDLSPCMSVRHATVSSQRYSNLTYRLLPHNAPIGKISLPFNPTVP

SEQ ID NO: 280366 - protein, 46 aa, Glycine max
  Clone ID: PAT_MRT3847_95193C.1.pep
KFRCSDISFTILYYLALARQSHVYASIPDEDYWEAVKSNTPIPTAL

SEQ ID NO: 280367 - protein, 126 aa, Glycine max
  Clone ID: PAT_MRT3847_95194C.1.pep
IPPEKRNPQQYWSPQVMSGVKLLLDKRLVSLLLGGLVVLKANPVQLLPRLIRLKKNVVRVIKFDCKFFSFVFLFFKRLFVKQFGPLFQNHFFPNKWSFQKTVFYICLVACSILQIIAILSSSPWFN

SEQ ID NO: 280368 - protein, 49 aa, Glycine max
  Clone ID: PAT_MRT3847_95195C.1.pep
LDSKQYLLSIRRILKKGRCYTIQHSLHILKISSKFDSFSNTMKKNFHPF

SEQ ID NO: 280369 - protein, 140 aa, Glycine max
  unsure (1)..(140): unsure at all Xaa locations
  Clone ID: PAT_MRT3847_95196C.1.pep
GGAREGMGGNSGKGREGGKRIKGKGGGEGGRRRGGRAGRGGEVERTRSDVGGGGRGGGEGGEGGERRWILNEGGDGKGGEKKKKGGEGGEINKGEGXEGREWDKAGGGNERGERGKEMACKIPSPNGPDSVWPPRKFLQR

SEQ ID NO: 280370 - protein, 236 aa, Glycine max
  Clone ID: PAT_MRT3847_95197C.1.pep
MATLDERPSAKRWLPLEANPDVMNQFLWGLGLPVDEAECCDVFGLDEELLEMVPKPVLAVLFLYPITAKSEEERLQQENVKKDYSSKVYFMKQTVGNACGTIGLLHALGNITSEVKLVEGSFFDKFFKSTASMDPLQRAVFLENDREMEVAHSVAATAGDTVASDNVDTHFICFACVDGELYELDGRKSGPISHGPSSPSTLLRDAAKVIQSMIQKNPGSLNFNVIAISKKSKDGH

SEQ ID NO: 280371 - protein, 92 aa, Glycine max
  Clone ID: PAT_MRT3847_95198C.1.pep
LNYTKHYSLVWLLRFLLWPVLHHSGSILELVCFPVSRASMHLFLQIYILLGGCLIRLDSLDLFIDIFLSSVRDIDQVCVLNFCWILMDLQAS

SEQ ID NO: 280372 - protein, 80 aa, Glycine max
  unsure (1)..(80): unsure at all Xaa locations
  Clone ID: PAT_MRT3847_95199C.1.pep
SEGHYGACVDLQRTHRLNGMNYREATVGVSENTGFSWACALNRSHRGRATPDIYTICSQDCEXWDPACTHAWTMSCNASS

SEQ ID NO: 280373 - protein, 134 aa, Glycine max
  Clone ID: PAT_MRT3847_9519C.1.pep
PAIVSTWILHGAIAGDLKAKDFEIGCHVKLVAPTSWWGLDTDKYSYSLMHRALVYGFEISWMRFACEEEDCGDHGSCYFDFDKQKPRCVVCSAFPWEKGKKCGKGKLNHYNFYRITIFLLSLPKFKTINFIFTS

SEQ ID NO: 280374 - protein, 215 aa, Glycine max
  unsure (1)..(215): unsure at all Xaa locations
  Clone ID: PAT_MRT3847_951C.1.pep
RKQQKKQCTGLCEKAINKHWAACENNRQVEDGEEVGNIERPRGNGKGERATGKVEECARPGFGDVLSSESALFLSNTMPIQDAXIYSVRVGLYAIKVFXLLLNSDLPINLVRLAANRGASGIDGLLSTAIGFSVGCNKKVLCVIGDISLLHETNGLTIFNQRVKHLHVKTKAELKEAMCVAQHEQMDCMVEIESSINANANFHRFNLHFGYLIFC

SEQ ID NO: 280375 - protein, 139 aa, Glycine max
  unsure (1)..(139): unsure at all Xaa locations
  Clone ID: PAT_MRT3847_95200C.1.pep
MREDDTRGRNTLHIGLQAIKSGTDEILHGLVDLQEHDPAIVHRDSCXESMMNRGHVGQGKMDDRGVTAALHGPQTNHSAIGTQXFMEPETYXEQDYDELRDVNSFDRXDLEMPTFDYPYRECANPAQRYKKETSAKLPA

SEQ ID NO: 280376 - protein, 94 aa, Glycine max
  Clone ID: PAT_MRT3847_95201C.1.pep
LLGIILISAMFLTVISEINRHACILGIHEHSGTCSTAWMECSGSLAISPLRAIPIHGVEDSTMAQSFKQSPHFISSISSCNSVAPTAPAPALLP

SEQ ID NO: 280377 - protein, 163 aa, Glycine max
  Clone ID: PAT_MRT3847_95202C.1.pep
MSSCITSSVDPVEGNRDRKFLKVNPLCKPPMTPDVTQDVDDETCSDESCGEMDPTDWTDDEKTAFLQAVSSFGKDFAKIARCVGTRSQEQCKVFFSKGRKCLGLDLMRPIPENVGSPVNDDANGGESDTDDACVVETGSVVGTDKSGTKTDEDLPLYGTNTYH

SEQ ID NO: 280378 - protein, 230 aa, Glycine max
  Clone ID: PAT_MRT3847_95203C.1.pep
MAYCIPNSPSLQGWKTGPCCLFGWNIGKNRVNGKPQIKYHDIDLTFPTSLVDKTFLRGKELKCCYRATIDGFSATNFHECCDFKGPCVIIGYTNKSFKFGAFNPEGYRSTDDYYDTFDAFLFYWIDNETTKPIMLPKVGGSGAALFDYARGGPQFGADGLLIGPPLAPVMGGFAGPDTNSGIGDLRQAKSRLGLSYAKREDGKESIFGDESRATLEEVEVFCSPQIASLY

SEQ ID NO: 280379 - protein, 65 aa, Glycine max
  Clone ID: PAT_MRT3847_95204C.1.pep
ASQRFPNEHTDSRTDPATSCISCTAAEDLHHWPAIIMEPTDRPYTGGVLLLSIDCPSDYPYRPPK

SEQ ID NO: 280380 - protein, 56 aa, Glycine max
  Clone ID: PAT_MRT3847_95205C.1.pep
PFIITSDNSECMKRGSNSMMKQCEEMTTTAMGFIYEFGLGSFDRELREVSASSESK

SEQ ID NO: 280381 - protein, 70 aa, Glycine max
  Clone ID: PAT_MRT3847_95206C.1.pep
RRQNSKLLLHHFFFLLCAVATLLHFLPFRFINCVYDLRICLSRLTQTTQTILNLTNATSPPVTVSTSPLS

SEQ ID NO: 280382 - protein, 88 aa, Glycine max
  Clone ID: PAT_MRT3847_95207C.1.pep
MALSASDVAAMYSLLSNSMSTDHRLRGPAEDALAQSESRPGFCSCLLEVITAKDLGSQTDVRMMATVYFKNSVNRYWRHRRNSSGISN

SEQ ID NO: 280383 - protein, 66 aa, Glycine max
  Clone ID: PAT_MRT3847_95208C.1.pep
LRVLSEFNEPIQIDHFMKFTSFLNFFKVLFIIDILWPKSSFMLFNSSRYDCRMFTTRSACASFFLT

SEQ ID NO: 280384 - protein, 46 aa, Glycine max
  Clone ID: PAT_MRT3847_95209C.1.pep
AAAVSTVCYNLRFTHPTLDLPVIDYDMALLYQPMLTLGTNIGAAFK

SEQ ID NO: 280385 - protein, 66 aa, Glycine max
  Clone ID: PAT_MRT3847_9520C.1.pep
QSIPSPFLLTPLNSFISHSKIIVPLIFCNTLSRFTILLLLIKEEKSARHAPLLAAYTRAPYIGKSK

SEQ ID NO: 280386 - protein, 226 aa, Glycine max
  unsure (1)..(226): unsure at all Xaa locations
  Clone ID: PAT_MRT3847_95210C.1.pep
KRLKDEKHNFKYEFKIDSNNRLEHIAWSYSSSIQSYXVFARPVVFDTTYRVEAYDMLLGIWLGVDNNGMTCFFSCALLRDENIQSFSWALKAFLGFMKGKAPQTILTDHNMWLKEAIAVELPQTKHAFCIWHILSKFSDWFSLLLGSQYDEWKAEFHRLYNLEQVEDFEEGWRQMVDQYGLHANKHIISLYSLRTFWALPFLRHYFFAGLTSTCQSESINAFIQRF

SEQ ID NO: 280387 - protein, 266 aa, Glycine max
  Clone ID: PAT_MRT3847_95211C.1.pep
MVALSFQGGRASPAQPQHPSLCSGRAAGVIRIRCGIAEPSGEPAPLGQKTRYHDGIFEKAFMTLFARKMEKFSDPPAGKARENKGWWDWGYDYESFVDVSRRVMQRRSRIQQQQVVREVLLSMLPPGAPAQFRKLFPPTKWAAEFNAALTVPFFDWLVGPSEVVEVEINGVKQKSGVHIKKCRYLENSGCVGMCVNMCKIPTQDFFTNEFGLPLTMTPNFEDMSCDMVYGQSPPTFEEDPVSKQPCYADICSMAKPSSSVCPKLQA

SEQ ID NO: 280388 - protein, 87 aa, Glycine max
  Clone ID: PAT_MRT3847_95212C.1.pep
VCVFPPPYMYHAPTDIHCPPLMSPVTFSSVAAKAYTLWLGSSSQNKVSLIVRLSVKAGCYHHIVKYQVFNFKTFVCGTCRMYYCVML

SEQ ID NO: 280389 - protein, 68 aa, Glycine max
  unsure (1)..(68): unsure at all Xaa locations
  Clone ID: PAT_MRT3847_95213C.1.pep
GTPSFPYSGKWFFKPTPHSWKQAKTVLRFLKAGKKKNGGVEKKPRDIFGVWKRTGXLLAETGLKRKLK

SEQ ID NO: 280390 - protein, 101 aa, Glycine max
  Clone ID: PAT_MRT3847_95214C.1.pep
RFCTFAVSHHCFPVDSLFAIFCQCAELNPEPNDGEGEEHGWFFSADQMGDEEAEEEGYISHHPANSIGHSNGNHDLARTILEVGCSSLYFSIYFCFCSMIL

SEQ ID NO: 280391 - protein, 90 aa, Glycine max
  Clone ID: PAT_MRT3847_95215C.1.pep
CARQTFEGNSSTIAIMNSRCPDKWLLDHVGYICVIIPFSNNGQFFRCGIEDRRKRPLNMAFFIGFSPLFLRRALLIVSGSVHDRTLEFRL

SEQ ID NO: 280392 - protein, 94 aa, Glycine max
  unsure (1)..(94): unsure at all Xaa locations
  Clone ID: PAT_MRT3847_95216C.1.pep
LCSLVFVGFRFPTLNSPNLNCCNALAKFQSLPKGREESWGGTHLLPPSRCRFIRAAXTXPSTPDGXEALSVAAESPCRARSRLQPLQALVPMAG

SEQ ID NO: 280393 - protein, 63 aa, Glycine max
  Clone ID: PAT_MRT3847_95217C.1.pep
SCEWEWENPPPNEYSLVSSFRFLIISFLPREGMNAIFLGVFYPGNGLAPLNFLNLSPFFWAHC

SEQ ID NO: 280394 - protein, 51 aa, Glycine max
  Clone ID: PAT_MRT3847_95218C.1.pep
SKIKKGPTGFFKGHATNTQLVEKFSIKLLSFTSNLLLGKLVDKRLGDVRNH

SEQ ID NO: 280395 - protein, 85 aa, Glycine max
  unsure (1)..(85): unsure at all Xaa locations
  Clone ID: PAT_MRT3847_95219C.1.pep
AAASSMDLSSPSLAGKAEKLGPSTPEVGRVSMRKTGTKQVSXXSPWYGPYRVKNLSPXSGEHPNYLTGEIPDDYGXDTAGLCEDP

SEQ ID NO: 280396 - protein, 268 aa, Glycine max
  unsure (1)..(268): unsure at all Xaa locations
  Clone ID: PAT_MRT3847_9521C.1.pep
NTEDNRFHPVTDINKGPYKRKGSXMXLLERKKLKAHFPNTSENMNVLQFLGFRSDEFKHLFLYGIDIYFCPEGVFTQYGLCKGCQKMFELCVCWAGQKVSYRRMAWEALAVERMLRNDEEYKEYLEDIEPYHGDPVGYLKFFSVKRREIYSQIQRNYAWYLAITRRRETISVLDSTRGKQGSQVFRMSGRQIKELYNKVWSNLRESKTEVLQYFLNWDEKKCREEWEAKDDTVFVEALEKVGVFQRLRSMTSAGLQGPQYVKLQFSRH

SEQ ID NO: 280397 - protein, 52 aa, Glycine max
  Clone ID: PAT_MRT3847_95220C.1.pep
LNMTRSKGLRGTTILIQSPVLRLQTALSYLGCRSAMPCAAVLLKGICWSCDV

SEQ ID NO: 280398 - protein, 59 aa, Glycine max
  Clone ID: PAT_MRT3847_95221C.1.pep
VNLVKRIIIAAKKKKKKKKKKKKKKKKKKKKKKKKKKKKKKKKKKKKKKKKKKKKGGAV

SEQ ID NO: 280399 - protein, 129 aa, Glycine max
  Clone ID: PAT_MRT3847_95222C.1.pep
MVSNRIQIPLLSNHLSDASIKDKPSVTPDGQYLLYVSSHENPGVPRASWTAVYSTQLESGLTQRLTPYGVADFSPSLSPSGLWTAVASYGPHGWAGEVEDLTTDIYVFLTHDGTHRFKIVEHGGWPTWV

SEQ ID NO: 280400 - protein, 95 aa, Glycine max
  Clone ID: PAT_MRT3847_95223C.1.pep
GPTVWQFLLFSKNKSAEDTHKAEADNIKQQHINDHCSNNNLGPIATSLLSGWRGPTSGHIRPNPRVEPPIPNRESSLVEAKLLSDNEPCIDDCTR

SEQ ID NO: 280401 - protein, 127 aa, Glycine max
  unsure (1)..(127): unsure at all Xaa locations
  Clone ID: PAT_MRT3847_95224C.1.pep
RVRIKLGLVFREHNRSHGFNDGRTCTMWNQHMFDCLYVSQVLKELQXTNAASLNGVIGIIRFDTVWQVQCTSFHCRQRRQACKSFKDLPSICNHPPLYVDLIIRCHFILLYKISSPGIFGFCPRAPM

SEQ ID NO: 280402 - protein, 90 aa, Glycine max
  Clone ID: PAT_MRT3847_95225C.1.pep
HQKMRSNFSLVLLFLTSCIIILNFFFVVGGFRFLYTESYSFTFYFVTLYVTKKVSLSDLQRLGLETRFVHVIARKWYLFLFFLCAPPRVI

SEQ ID NO: 280403 - protein, 240 aa, Glycine max
  Clone ID: PAT_MRT3847_95226C.1.pep
MAFSLFQNPTFLKLKPPTIATPRWGYVRVRCGGPRSQRSPLMKGRILSIEAIQAIQTLKRLHRTNPPNLSSLVSNTLTRLIKSDLLATLRELLRQQHCTIALRAFSTLRSEYGADLSLYAEIISALAAAAAAAEMTDHVDRLILDLEAENEEIKCDDHKGLASLIKAVVAARSRESTVRIYGLMKKSGYGSVTEPDEYVVKVLVNGLKSFGEEALARELQDEYKIALAMFSKPQLNTLRF

SEQ ID NO: 280404 - protein, 292 aa, Glycine max
  Clone ID: PAT_MRT3847_95227C.1.pep
MAERETSESEDPSSSGSEYEDAQTVEGNGVKKKKGLSEYEKQRMSRIAENRARLEALGLPQIASSLKGSSQPHKATKGKEKKKKVKDDDDEEYEPEEDEGEQVSGSSSEENEDRKDEDFAIENASGSRKRKVKSKSLKKKARVSGKKHVSNSEYIDYDDDEALRQAIALSLQDSAEGSYLPDKNVVNTCKNEKKGSGHVQEDKGRKKNKKSFASRLQLTEDELIVHFFQLDEAGKGTISVRDIQRAATAHDFLWTDKELVDMIRYFDSDGDGKLSLDDFQKIVVRCNLIKGS

SEQ ID NO: 280405 - protein, 69 aa, Glycine max
  Clone ID: PAT_MRT3847_95228C.1.pep
KEKDFIENMGLEVHLKIIGKYIFLRLSKKKIPFISLTKLTFVFFFFFYSKGKCSSSNFFSLPTKNLYIR

SEQ ID NO: 280406 - protein, 114 aa, Glycine max
  Clone ID: PAT_MRT3847_95229C.1.pep
AQFIIGRCITGIGNGINTSTIPTYQAECCKAKNRGKVICIEGSMVAIGTLIAYWIDYGCLYGPDDFTWRFPIAFQCVFTFIVLGMMIQLPESPRWLLTHHREDEAATILASLNG

SEQ ID NO: 280407 - protein, 45 aa, Glycine max
  Clone ID: PAT_MRT3847_9522C.1.pep
VCMIFFLKNFCVSLDFLFEKVLFCCPNTLIKNLLGLQKKKKKNKK

SEQ ID NO: 280408 - protein, 205 aa, Glycine max
  Clone ID: PAT_MRT3847_95230C.1.pep
MCRGTFVGATTVGVVEALKDQGYCKMNNTMMKSVAQQAKSHLGSATRAKKLASPSPSSSSATSNNETYMMASESSTAPMYASYWLPLNQVLITHDDMNILGGVLRLHDKGGHGSHQGLKSVIYHFKGNREFPRLRIGIGSPPGQMDPKAFLLQKFNVTARQRIDEALQEGVDALKLLLSKGLAVSAKRFNKEQKYKHLRVQNLPV

SEQ ID NO: 280409 - protein, 418 aa, Glycine max
  Clone ID: PAT_MRT3847_95231C.1.pep
YSSSSSSCNCSIKPWHLRQLDVNNAFLHGELDEEVYMQIPPGLSVDNPKLVCRLQKSLYGLKQASRQWFVKLSSFLTSHGFHQSTADHSLFLRFTGNITTILLVYVDDIILTGNSMTEIQTIVTLLDSEFKIKDLGDLKFFLGLEIARSSKGIHLCQRKYTLDILNASGMLGCKPNSTPIDYSTKLQADSGSPLSAESSSSYRRLIGKLIYLTNTRPDITYAVQQLSQYMAAPTNAHLQAAFRILRYLKSSPGSGIFFTAAGTAQLRAFSDSDWAGCKDSRKSTTGYLVYFGSSLVSWQSKKQPTVSRSSSEAEYRALASTTCELQWLTFLLQDFRISFVQPANLYCDNQSAIQIATNPVFHERTKHIEIDCHIVRQKLNSGLLKLLPVSSALQLADIFTKALAPAISLIYNKTKHFY

SEQ ID NO: 280410 - protein, 45 aa, Glycine max
  Clone ID: PAT_MRT3847_95232C.1.pep
DFRNLVISLIIFLLKCYVLSIFLPYNWCVLIIVNLWLKIRIICNL

SEQ ID NO: 280411 - protein, 50 aa, Glycine max
  Clone ID: PAT_MRT3847_95233C.1.pep
NWPTKIKISKKRKKGSPPRGHFLMKSLYSSHDRIPNPKKPARYFPAPLKN

SEQ ID NO: 280412 - protein, 76 aa, Glycine max
  Clone ID: PAT_MRT3847_95234C.1.pep
YSKIFGILLRKNKRNHFLLLLLLLSSWNQKLEITQLYADSKVGFLHEQVCREIIGRSSKAKREQSKFFLSQGRSRI

SEQ ID NO: 280413 - protein, 384 aa, Glycine max
  unsure (1)..(384): unsure at all Xaa locations
  Clone ID: PAT_MRT3847_95235C.1.pep
MFWCVFVDRSPVMDRLLSSSSPPSFTFLTRFESATARFNFTRSHSHLKRVTSICCQHANPSPFTPFLASSNHPNTFPSISSPSVRSTPESHSLNQIKTGAFPKPKAITARTLVILSALAMILIQPAIAPAAFATFQTAAKTGGPAAAVGRKLIHTELLSSAWTGFXAGCLHTLSGPDHLAALAPLSIGRTRMESAAVGALWGCGHDAGQVLFGLIFLLLKDQLHIEIIRTWGTSVVGXLTLLIIGAMGIKEASEVHAPIVALESDECDVNVYESLDNPTVGKKKIGFATFATGIVHGLQPDALMMVLPALALPSRLAGAAFLIMFLIGTVIAMGSYTVFIGSCSQALKDRVPRITEKLTWVSSLIAIALGFAIIISQFFGFSLY

SEQ ID NO: 280414 - protein, 130 aa, Glycine max
  Clone ID: PAT_MRT3847_95236C.1.pep
LRLSIDASCPLETDFNYDHHVYLQCDGLRRSRYFCALLSDRWIGHAAPELWSWCCCNRERELDLFRLSLGEGPTGGSIQWHLTVLELLYTNDFCVVADCARTALDLLPVALELLFADCARWCQDLLEAAP

SEQ ID NO: 280415 - protein, 54 aa, Glycine max
  Clone ID: PAT_MRT3847_95237C.1.pep
VSSYISNQPSTSLYFTTINTFHHLKILFPPISSTPPYFYPISYFLPLIIYILNI

SEQ ID NO: 280416 - protein, 219 aa, Glycine max
  unsure (1)..(219): unsure at all Xaa locations
  Clone ID: PAT_MRT3847_95238C.1.pep
MRVLVLLMLFLHSLHAARISEYRALLSFKASSITNDPTHALSSWNSSTPFCSWFGVTCDSRRHVTGLNLTSLSLSATLYDHLSHLPFLSHLSLADNQFSGPIPVSFSALSALRFLNLSNNVFNQTFPSQLARLSNLEVLDLYNNNMTGPLPLAVASMPLLRHLHXGGNFFSGQIPPEYGTWQHLRYLALSGNELAGYIXPELGNLSXLRELYIGYYNTY

SEQ ID NO: 280417 - protein, 86 aa, Glycine max
  Clone ID: PAT_MRT3847_95239C.1.pep
LSRSNCPRSCHRNFLRIGPLGRPPNSIGCFLVVIVVFTVVLLVVLFVVAIGRIPVMRLLGPCVLPRPRPNLATTTAQHWSVRDIEI

SEQ ID NO: 280418 - protein, 88 aa, Glycine max
  unsure (1)..(88): unsure at all Xaa locations
  Clone ID: PAT_MRT3847_9523C.1.pep
GAVISNVGPLELVPEASALVTTGASMEHDQLPPTLNVKRPNSLIDFIDTPFYINPDVVNGHTQDLALFRXAGVSPFGYGGSNVPIVIE

SEQ ID NO: 280419 - protein, 148 aa, Glycine max
  unsure (1)..(148): unsure at all Xaa locations
  Clone ID: PAT_MRT3847_95240C.1.pep
WCAPCVGPLFFLPSVLAGSAPLPLGFLGAPSPRCXLLFCFVAGFFXALXGGSPRXVFCLGGLVLPGFFPFSAWGRPLXFLPFPGVGFVLPSGAXFPLAGFFXFXPXXXLXCFVWVGSFLXALPLPPFCFFSXFSHILPAFFXXXXGRP

SEQ ID NO: 280420 - protein, 63 aa, Glycine max
  Clone ID: PAT_MRT3847_95241C.1.pep
WRMAVHGGKSKIRHKNMADGVAENGGCHGGPKKKYIYIYKLIEIEKNQGLHSNQLKKFDEFFQ

SEQ ID NO: 280421 - protein, 81 aa, Glycine max
  Clone ID: PAT_MRT3847_95242C.1.pep
SGGYGAAGGGGVYPDTTTDGGYSKTSGGGYDDEVDYKKEEKHHKHLEHLGELGAASAAAYALVIFFTIIINLLFIYIIYFH

SEQ ID NO: 280422 - protein, 245 aa, Glycine max
  Clone ID: PAT_MRT3847_95243C.1.pep
MTMSGPEEHGSMSLMGSLRVIELQLVAFALVFSASGLVPLLDLAYSALISIYLMLLGRFAFPSHGCAPGPMFHESGLFQVYVVVGTTVGLFLPLAYVLGGFGRGDKQAVRSASPHLFLLAFQILTENVISSFSLFSPPVRAMVPLMYTVRRIFVDIGWIHDVCLNKTLPPYANLKDKAWFWFGRVLAVANLVYFSINLFGFLIPRFLPRAFMRYFQERGEIYAKLVEEKRYVNVVNNKSHPPDKK

SEQ ID NO: 280423 - protein, 100 aa, Glycine max
  Clone ID: PAT_MRT3847_95244C.1.pep
LPIFKFKLKNNENGDDQDANSAIDEGGILAAGTEKERMISGEDAVCCICLAKYADDDELRELPCSHVFHVECVDKWLKINATCPLCKNEVGTSNGGSPSA

SEQ ID NO: 280424 - protein, 87 aa, Glycine max
  unsure (1)..(87): unsure at all Xaa locations
  Clone ID: PAT_MRT3847_95245C.1.pep
EGNTTRNQXQXPAETQDTGDAKETEGGEPTXXKGXXKDPPGXQGEKDAEXXPNTGDRRTTEHRAPAGNRNKDRPXAKNXQERGAEQK

SEQ ID NO: 280425 - protein, 34 aa, Glycine max
  Clone ID: PAT_MRT3847_95246C.1.pep
ETGREYFMLTNHYEVCLQVFMYLIALYLRKVFFS

SEQ ID NO: 280426 - protein, 78 aa, Glycine max
  Clone ID: PAT_MRT3847_95247C.1.pep
MTMTTLAESTDTLDEESADTIDNESVPTHHQERIPADQQMLDGATLPVYDIQTVSAFNLELELPVGLELRLRGGDEAP

SEQ ID NO: 280427 - protein, 353 aa, Glycine max
  Clone ID: PAT_MRT3847_95248C.1.pep
HELLFSNLLVVRCRLIFYHPSFRASYILIFDHGLIEQTTRLYKGKEHAEVEFIVGPIPIDDGVGKEIATEIKTNLASNKTFYTDSNGRDFIERVRDYREDWHLEVNQPVAGNYYPINLGIYLKDKSKEFSILVDRAVGGSSIIDGQLELMVHRRLLEDDSRGVAEALNETVCIHDNCTGLTVLGKYYFRIDPVGEGARWRRSFGQEIYSPLLLAFTESEGHWGDSHVTTFSGIDSSYNLPDNVAIVTLQDLGDGKVLLRLAHLYEIDEDKYLSVKATVELKKVFPNKQINKITEVSLSANQERDEMERKRLVWQVKGSPPEPKVWRGGPVDPENLIVELAPMEIRTFIISFRH

SEQ ID NO: 280428 - protein, 42 aa, Glycine max
  Clone ID: PAT_MRT3847_95249C.1.pep
QVHQSSNALVRPIVTGNPTAKVLENPKLAPMAVCCCYCCFHA

SEQ ID NO: 280429 - protein, 169 aa, Glycine max
  Clone ID: PAT_MRT3847_9524C.1.pep
MQSLQQKASEWSGVSIDDAFGIDDTNLFQKLGLQTFINLSTNFYNRVYDDEEEWFRSIFANSEKENAIQNQYEFFVQRMGGPPLFSQRRGHPALIARHRPFPVTHQAAERWLHHMQHALDSTTDIDDDSKTKMMNFFRHTAYFLVAGDELKNQNQHIPCKHAAAKKDDS

SEQ ID NO: 280430 - protein, 396 aa, Glycine max
  Clone ID: PAT_MRT3847_95250C.1.pep
GLANITRTNHIMWTMGTDFKYQYAQTWFRQLDKFIHYVNQDGRVHALYSTPSIYTDAKHAANEAWPIKTDDFFPYADRVNAYWTGYFTSRPAIKGYVRLMSGYYLAARQLEYFKGKSALGPNTDSLAEALVIAQHHDAVSGTEKQHVANDYAKRLSIGYTEAEKVVAVSLACLTEGATKTGCKNPQTKFQQCPLLNISYCPASEVDSSNGKNLVIGVYNPLGWPTRPPTRPPTRPENVVRDSSGKKIQSQLVPILDDFLGLRNYHTVAYLGVSPTVKPKYWLAFSAAVPPLGFSTYYVSYAKKEATISDRDTAYQSWNKSDTITVGLKNLKLVYSVKEGKLTKYINSRSKVKEPLEQAYKFYTGYGNDGTETAQASGAYIFRPDGSPSPIKSNGKS

SEQ ID NO: 280431 - protein, 1002 aa, Glycine max
  unsure (1)..(1002): unsure at all Xaa locations
  Clone ID: PAT_MRT3847_95251C.1.pep
MENTGLCVLCFILLLLGCVISSECKYIRYNTTSTIVPGKLNVHLVPHTHDDVGWLKTIDQYYVGSNNSIQGACVQNVLDSLVTALLADKNRKFIYVEQAFFQRWWREQSDDIQNIVKELVNSGQLEFINGGFCMHDEAATHYIDMIDQTTLGHQFIKEEFGVTPRIGWQIDPFGHSAVQAYLLGAEVGFDSLFFARIDYQDRAKRKDEKTLEVVWRGSKSFGSSSQIFSGAFPENYEPPSSFYYEVNDDSPIVQDDVSLFDYNVPERVNEFVAAAISQANITRTNHIMWTMGTDFKYQYAQTWFRQLDKFIHYVNQDGRVHALYSTPSIYTDAKHAAKEAWPIKTDDFFPYADRVNAYWTGYFTSRPAIKGYVRFMSGYYLAARQLEYFKGKSPLCPKTDSLAEALAIAQHHDAVSGTEKQHVANDYAKRLSIGYTEAEKVVALSLACLTEGATKTGCKNPQTKFQQCPLLNISYCPASEVDFSNGKNLVVVVYNALGWKREDIIRIPXKNIQSQLVPILDDFRGLRNYHTVAYLGVSPTAKPKYWLAFAATVPPIGFSTYYVSYAKKEATISDRDTAYQPGNKSDTITVGLKNLNLVYSVKEGKLIQYINSRSKVNESLEQAYKFYAGYGNDGTETAQASGAYIFRPDGSPSPIKSNGKSPLTVFRGPIVHEVHQKISPWIYQTTRLYKGXKEHAEVEFIVGPIPIDDRVGKEIATEIKTNLASNKTFYTDSNGRXLNEESVRDYRKDWHLEVNQPVAGNYYPINLGIYLKDKSKEFSILVDRAVGGSSIIDGQLELMVHRRLLQDDSRGVAEALNETVCIHDKCTGLTVLGKYYFRIDPVGEGARWRRSFGQEIYSPLLLAFTESEGHWGDSHVTTFSGIDSSYNLPDNVAIVTLQDLGDGKVLLRLAHLYEIDEDKYLSVKATVELKKVFPNKQINKITEVSLSANQERDEMERKRLVWQVKGSPPEPKVWRGGPVDPENLIVELAPMEIRTFIISFRH

SEQ ID NO: 280432 - protein, 121 aa, Glycine max
  unsure (1)..(121): unsure at all Xaa locations
  Clone ID: PAT_MRT3847_95252C.1.pep
LPARWELKARRANPPEGHQRHVPLGGGPLLVKRTAGAXVXXSPDXDLKAFSHNPXHGSFAPLAFQPSAMTNXANQRFXSYXVELLLXHXHQXGKTNLXNXGXNPXXXPYWXVNNPTLXEFC

SEQ ID NO: 280433 - protein, 82 aa, Glycine max
  unsure (1)..(82): unsure at all Xaa locations
  Clone ID: PAT_MRT3847_95253C.1.pep
IDSFHQFAGVKWLREKPLSKFEDVQWLLIHKAEEEKLIQVTIXLPEQYLNKLIDQFNEYYISDSVSRSAQLWNDQRKLILHD

SEQ ID NO: 280434 - protein, 116 aa, Glycine max
  Clone ID: PAT_MRT3847_95254C.1.pep
PLFPQEAPFKTSPTHYAQSGRPKAPPQAVFVTHSDVLLPLKKSPNMRLDGKPLQIELVGPSLATPAVAPLCQNTLMGSPNDAHFRCEILIFARLCFPPLYISSSSLNCDPIISFTL

SEQ ID NO: 280435 - protein, 42 aa, Glycine max
  Clone ID: PAT_MRT3847_95255C.1.pep
SHGPGAPGSKGPRRRMGPPLGCNLPSFFIVPHFFPRVSARVN

SEQ ID NO: 280436 - protein, 153 aa, Glycine max
  Clone ID: PAT_MRT3847_95256C.1.pep
MDRRRKYPTLFTTTNGQASFWRRMAAPGSSAGGGGGTAKATVAEQISQAVQSTSNLLHLMRHSSPAQAQLVKLPKNLLAKVSTIKNTEQVLEQLPGVISSLDAHMENGLQNVPHLKTVVQVLSNMESSQLSLLSRPHPLQKELEPGNQSQGTG

SEQ ID NO: 280437 - protein, 279 aa, Glycine max
  unsure (1)..(279): unsure at all Xaa locations
  Clone ID: PAT_MRT3847_95257C.1.pep
MLIRRLPWTAISFAAPLPFCFGATNGLPIRKQLNSSLFSFFCSSSGVNLPLQPGHETDTRHSQSLKPGLYLVGTPIGNLEDITLRAIRVLNSADVILSEDTRHSGKLLHHYNIKTPLMSYHKFNESHREQLVLRRLKQGEIVALISDAGMPGISDPGTELAKLCVSXEYPGCENPWAVPIPGPCALVSALSASGLPTDEFTFVGFLPKHSGSRRKRLMVSADQTTTQIFYVPPHKLSQFLDESSSIFGDARQCVIAREMTKLHEEFWHGTLGEAKEVFS

SEQ ID NO: 280438 - protein, 266 aa, Glycine max
  Clone ID: PAT_MRT3847_95258C.1.pep
MAPTKKSTGKKVAPSPYPVKGKQTTKAAANPLIEKTPKNFGVGQDVQPKRDVSRFVKWPQYVKLQRQKKIIYQRLKVPPALNQFTHVLDKNTATQVFKLMHKYRPESKNEKRDRLRAAALAKSEKKEVAKTDKPVVIKYGINHITALVEAKKAQLVVIADDVDPIELVLWLPALCRKMGVPYCIVKGKARLGTLVHKKTATALALTEVSEADKAELATIVSAVNTNFTEKWEDVRRHWGGGIMGPKSNAKMAKRAAIAAKEIAARQ

SEQ ID NO: 280439 - protein, 140 aa, Glycine max
  unsure (1)..(140): unsure at all Xaa locations
  Clone ID: PAT_MRT3847_95259C.1.pep
AQIRKTQTNNTKTIIHFGFFMGGRWRDPGSICISPMPPKRQTFSVFIYANASPPANFLFIHTHPHSNPHKIKGIHPTNRLMQKNLEKXTCISNIPTLTTSSKERQVTTHHTTTQIHHPPNLTFLLILINIGNIKELRNID

SEQ ID NO: 280440 - protein, 92 aa, Glycine max
  Clone ID: PAT_MRT3847_9525C.1.pep
SPVSAISLLPLTIFLSRLPFETILSACPSVPPLPKLIIMTSFKSSKRLLGSGIPRSSGNSHMSPSIVHPMHRHGTNKFISQTQNTKRKERSV

SEQ ID NO: 280441 - protein, 393 aa, Glycine max
  Clone ID: PAT_MRT3847_95260C.1.pep
MKTEKVWRLGGMGDMQILPGSRHRPPMKKPKWIIVLVLFVCVFLICAYIYPPQSSSTCYVFSSKGCKGFVDWLPPMPAREYTDEEIASRVVIKDILNSPAIVSKNSKIAFMFLSPGSLPFERLWDKVFPGHEGKFSVYVHASKTKPVHVSRYFVNRDIRSDPVIWGKISMVDAERRLLANALQDTDNQQFVLLSDSCVPLYDFEYIYEYLMYTNISFVDCFKDPGPHGNGRYSDHMLPEVEVKDFRKGAQWFAMKRQHAIIVMADNLYYSKFRSYCQPGLEGKNCIADEHYLPTFFQMVDPGGIANWSLTHVDWSERKWHPKSYRAQDVTYELLKNITSIDVSVHVTSDEKKEVQSWPCLWNGIQKPCYLFARKFTPETMDSLLRLLANYSGP

SEQ ID NO: 280442 - protein, 218 aa, Glycine max
  Clone ID: PAT_MRT3847_95261C.1.pep
MEDGGLGVEQSPSPEMAAMTSPETGLAVSAAEASPGFEKGSVQSEKEGVKKINGRGLKSNSVRDWWWKHENEVGVGESKKVKDYVMEWIGRDVNKERVKNGIEYGDVVVGKEEKNKKEKKRRKKELEWWESMEEEKLDGVMKRKRRTVREWWKEERFEENAKSSAKKKKKKRKGGSVKSDDEKCGDDWWMSDDAMDKRKGKSRSRNNRGNMDWWMDGL

SEQ ID NO: 280443 - protein, 138 aa, Glycine max
  Clone ID: PAT_MRT3847_95262C.1.pep
GQDVVYFLFYGPPGALGGEEKKRPPPPFGVFYVKAPPDLAKVFLGARTWGHPPVGIYYFKALQKQGGFLKLNFLVKKIGARPPVWGGGSGWPQGIHFRKNAGGKRGAPLGGIPPFGGKKWGPPFYPPGGGGNSGGFFK

SEQ ID NO: 280444 - protein, 89 aa, Glycine max
  Clone ID: PAT_MRT3847_95263C.1.pep
TAYKYGLICYRACCECYGNSGYSLVENCGVLWNAELCKHILLPSRSFLPNAEEYCPTNHPSVPLLLTKPCNPHRFRAPPFPGRTKCRPT

SEQ ID NO: 280445 - protein, 94 aa, Glycine max
  unsure (1)..(94): unsure at all Xaa locations
  Clone ID: PAT_MRT3847_95264C.1.pep
MGERKAWNKHHPPDFDPRXLGKARWATNQRGKALMMLTVSIHCNTLWXYIYKGTNLQSKREDGLGETYLRMHILGVQFKWTKWSSDVAMQTDPE

SEQ ID NO: 280446 - protein, 429 aa, Glycine max
  unsure (1)..(429): unsure at all Xaa locations
  Clone ID: PAT_MRT3847_95265C.1.pep
MMMSGMGNSRVLIFSLLVLATFQQVVSDEHQPLSKVAIHKTTLALDERAYIKATPSVLGLKGQNTEWVTLQYSNPKPTIDDWIGVFSPANFNASTCPAENIWVNPPFLCSAPIKYQYANFSSHGYQNXGKGSLKLQLINQRSDFSFALFHGXALTNPKLVAVSNKVSFINPNAPVYXPRLAQGKTWDEMTVTWTSRVRISDAEPFVEWGPKGGNLVKSPAGTLTFDRNTMCGAPARTVGWRDPGYIHTSFLKELWPNREYKYKLGHKLFNGTIIWSQEYQFKASPYPGQNSLQRVVIFGDMGKAEADGSNEYNNFQPGSLNTTKQIIQDLKDIDIVFNIGDLSYANGYLSQWDQFTAQIEPIASTVPYMTASGNHERDWPDTGSFYGTLDSGGECGVLAHTMYYVPAENPERSWYXVDYGMLKCCIHNT

SEQ ID NO: 280447 - protein, 41 aa, Glycine max
  Clone ID: PAT_MRT3847_95266C.1.pep
TLRFSMSSVVDRMKAITVYNRMANDPVFASALAVVPVSIRY

SEQ ID NO: 280448 - protein, 222 aa, Glycine max
  unsure (1)..(222): unsure at all Xaa locations
  Clone ID: PAT_MRT3847_95267C.1.pep
MMMSGMGNSRVLFVSMLVLATFQQAVSEEHQPLSKVAIHKTTLALDERAFIKATPNVLGLKGQNTEWVTLQYSNPKPTVDDWIGVFYAANCKKHMXNPPFLCSAPIKYQYANFSSHGYKNTGKGSLKLQLINQRSDFSFALFTGGLTNPKLVAASNKVSFINPDAPVYPRLAQGKTWDEMTVTWTSGYEISDAEPFVEWCPKGGNLVKSPAGTLTIDRNTMC

SEQ ID NO: 280449 - protein, 81 aa, Glycine max
  Clone ID: PAT_MRT3847_95268C.1.pep
MIGRIDREGPLMRNNSTNSLRKSRVLTAVAIGVLVGCVFAFLFPNGFFVSDSAATNHHLPLAGSKTQENSAGCESTDRVNM

SEQ ID NO: 280450 - protein, 85 aa, Glycine max
  unsure (1)..(85): unsure at all Xaa locations
  Clone ID: PAT_MRT3847_95269C.1.pep
FALKSFSVKKDGWENLTLPQGSSRSDKRMPLSISGGSXLAKNAILMNLPNADLSMWKYFVGELYYEDNKMTSSYIKSTSLCHNSY

SEQ ID NO: 280451 - protein, 246 aa, Glycine max
  Clone ID: PAT_MRT3847_9526C.1.pep
MLSRGAHGEVVGSGESGEDEMYEQQWKACAGPLVDVPRVGQRVFYFPQGHMEQLEASTNQELNQRIPLLKLPTKILCRVVNVHLLAEQETDEVYAQITLVPESSQDEPTNADPCTAEPPRAPVHSFSKVLTASDTSTHGGFSVLRKHATECLPVLDMSQPTPTQELVAKDLHGYEWRFKHIFRGQPRRHLLTTGWSTFVTSKRLVAGDTFVFSAWPISKPHSERLNNDHFLDQRMHLESPLSAKLM

SEQ ID NO: 280452 - protein, 169 aa, Glycine max
  Clone ID: PAT_MRT3847_95270C.1.pep
QRPKERKKLIFFFSLFTKTISILKRIYVAIIVPCDASSSQIKIIFFKSVCLWLLNYLSVSPKNRSRFLSLCQKGHERERESFSIPKDKTGDYLRKKRAVEAWKRAIQFRPIGTCIMARKMRCAPQEIGNNNPEVLEARKDSIPTIYQQQNKLTSLEVTINTSPFFIMTF

SEQ ID NO: 280453 - protein, 59 aa, Glycine max
  Clone ID: PAT_MRT3847_95271C.1.pep
LITRASWIVHMKLPDLCSVLSDPIVSQKGSQFSIFGYPEQCTSHCSSRKFTRPVLCVIV

SEQ ID NO: 280454 - protein, 101 aa, Glycine max
  Clone ID: PAT_MRT3847_95272C.1.pep
GRGKNVLSFKRVGRKRKKIPLGGAPFLIPLGGDFNSFGQIQNNLVFQGMGLPTKVYFIHVVATRLWGLDWFGFPYFGGAIMLTVCKIIKSKGASIVLTLTT

SEQ ID NO: 280455 - protein, 206 aa, Glycine max
  unsure (1)..(206): unsure at all Xaa locations
  Clone ID: PAT_MRT3847_95273C.1.pep
MEAKADYTQDGTVDFRGQPAVSSKTGKWKACAFLVGYEAFERMAFYGVASNLVNYLTTQLHEDTVSSVRNVNNWSGSVWITPILGAYVADSYLGRFWTFTLSSLVYVLGMTLLTVAVSLKSLRPTCTNGICNKASTSQIAFFYTALYTMAIGAGGTKPNISTXFGADQFDDFNPNEKELKASFFTGGMFTSFLGXALIATLGIGVH

SEQ ID NO: 280456 - protein, 55 aa, Glycine max
  Clone ID: PAT_MRT3847_95274C.1.pep
NHTKGLEGSMKRGWKRRVFRSFQLLESPCCINVRNMIFSFIQRGSTFWLNFGVRN

SEQ ID NO: 280457 - protein, 87 aa, Glycine max
  unsure (1)..(87): unsure at all Xaa locations
  Clone ID: PAT_MRT3847_95275C.1.pep
LPLGPXFXXFXVXGXLXVXXSPFLXLXXXXXLFXXFXSFSSFFVCRXXXXXPXXXWXVXXXRXGFWXXXPXXXXXVVFVXVCXCVRA

SEQ ID NO: 280458 - protein, 96 aa, Glycine max
  Clone ID: PAT_MRT3847_95276C.1.pep
ALAGKYIITLVLNCTLRCNKLWVERYNCWLGLNFEGLVPCICLLIGLCFIPESPRWLAKVGREKEFQLALRRLQGKDVDISDEAAEILVLSKLSLL

SEQ ID NO: 280459 - protein, 53 aa, Glycine max
  Clone ID: PAT_MRT3847_95277C.1.pep
IFPTDFSIKKTAKTQLLQKQKALKQIPFSPCGEIKKRTGLTFYPNIIPSFLGI

SEQ ID NO: 280460 - protein, 63 aa, Glycine max
  Clone ID: PAT_MRT3847_95278C.1.pep
HALASASEVAYDPSSARPGGYQFAGDRLQILNESLHVGLNAYLSAIQLFRLGTIESLSVAKES

SEQ ID NO: 280461 - protein, 39 aa, Glycine max
  unsure (1)..(39): unsure at all Xaa locations
  Clone ID: PAT_MRT3847_95279C.1.pep
TKWTRMSIFSTAGSYKFISVRAIHXYAREIWTIEPVLLP

SEQ ID NO: 280462 - protein, 74 aa, Glycine max
  Clone ID: PAT_MRT3847_9527C.1.pep
AHIFAKNFFVGPRKNFPKTGNPLGPATNVDPQTWATHFFFFFFFSKGFFFPPPNLVCKGGEGFSLKGFNFFCNS

SEQ ID NO: 280463 - protein, 291 aa, Glycine max
  Clone ID: PAT_MRT3847_95280C.1.pep
AREGIAGIKNLNVKAKASASAPFAKAIAEKVAIAAAGEADSSEAHMTKEQKLKAERLKRAKMFSAMLKSGVGASELPRALSVEPPGSGVSGSDAETGNLVGKEREGSSVPFDVDNSDKSQKSEDKLSIDNNSDKSQKSEEKLTDDNERRSKRKYRSRSSRHEEEEEENKDRRDHKRSRKKHHSHRASHHNRDRHKHKRRHSSSKDKYSYRGTKHDSSSDDEHHRSRHHRHKYDSSSSDDEHHSSKQRHRDDNLSDHEHRHSRHSNEDYSSSDDEHKHRSKNRSVRHKSKSH

SEQ ID NO: 280464 - protein, 134 aa, Glycine max
  Clone ID: PAT_MRT3847_95281C.1.pep
RLYPLNERATRTIRNLYIENERVILEGLWQEGFMALAAIGATNIGSIELFIEPELHTNRPRKKFLHSEPPEERIYGCEGVGRMLKKGDELGAFNMGSTVVVFSKPQFQNSLRAIHLKSSGSASAVGIEFVLVRL

SEQ ID NO: 280465 - protein, 183 aa, Glycine max
  unsure (1)..(183): unsure at all Xaa locations
  Clone ID: PAT_MRT3847_95282C.1.pep
PRVRPRVRPRVRPRVRDSPISGLIALLTAVDALSHLHDISNLKKQLVFAVFNGEAWGYLGSRKFLQELDQGADSVNGISSLLIDQVLEIGSVGKAISQGYPLFYAHAAGNSSISMKMVDALQSASESLGSDNVKVKPAASSNPXGVPPSSLMSFLGKNSSTPGLVLEDFDSQFSNRFYHSTLD

SEQ ID NO: 280466 - protein, 498 aa, Glycine max
  Clone ID: PAT_MRT3847_95283C.1.pep
MPTGFSLIFAASLFLLLLDCCSGSFVGVCYGRSADDLPTPDKVAQLVQLHKIKYVRIYDSNIQVLKAFANTGIELMIGVPNSDLLSLSQFQSNADSWLKNSVLPYYPATKITYITVGAEVTESPNNASSFVVPAMTNVLTALKKLGLHKKIKVSSTHSLGVLSRSFPPSAGAFNSSHAHFLKPMLEFLAENQSPFMIDIYPYYAYRDSRSKVSLDYALFDASSEVIDPNTGLLYTNMFDAQIDAIYFALMALNFRTIKVMVTETGWPSKGSPKETAATPDNAQTYNTNLIRHVINNTGTPAKPGEELDVYIFSLFNENRKPGLESERNWGLFYPDQTSVYSLDFTGRGAVDMTTEANITKSNGTTWCIASSKASQIDLQNAIDWACGPGNVDCTAIQPSQPCFEPDNLASHASFAFNSYYQQNGASDVACSFGGTGVKVDKDPSYDKCIYMRAGSNKTVTSNTTAMSTSSSSLNGNSSSIFTFLLVTCLFALMHIQRY

SEQ ID NO: 280467 - protein, 80 aa, Glycine max
  unsure (1)..(80): unsure at all Xaa locations
  Clone ID: PAT_MRT3847_95284C.1.pep
LLLLFPLPVIRFLLSSFFSCVACVSRILRLFPSLRRLFLLAFSPGPRLGPLLCPCSVGWSPGRXLQENAPXXPXXXXSQV

SEQ ID NO: 280468 - protein, 153 aa, Glycine max
  Clone ID: PAT_MRT3847_95285C.1.pep
MLKLEISKRFANGGNVVEEVAAQLETAKAAEREAVIKLGIVMEDADRCNRKAARVAEQLEASQAANSIIEAELKRLKIQSDQWRKAAKAAAAMLSAGNNGKLSERSMSLDNNYNSIMNKYSPFCEKLDDDDFQTKKNGNMLKKIGVLWRKPKK

SEQ ID NO: 280469 - protein, 216 aa, Glycine max
  Clone ID: PAT_MRT3847_95286C.1.pep
PRPNPFTYTIPYYKYNSTLFAFSLFSSLLSLLLRNLRTEHNRALQLSLSLMASQASLLLQKQLKDLCKNPVDGFSAGLVDETNIFEWSVTIIGPPDTLYEGGFFNAIMSFPPNYPNSPPSVKFTSELWHPNVYPDGRVCISILHPPGDDPNGYELASERWTPVHTVESIVLSIISMLSSPNDESPANVEAAKEWRDRRDEFKKKVSRCVRKSQEML

SEQ ID NO: 280470 - protein, 55 aa, Glycine max
  Clone ID: PAT_MRT3847_95287C.1.pep
SPACDEGEMGILLALSISLAAEDLHVINPLAPFPDILSVYKQYETLGLERMEVKD

SEQ ID NO: 280471 - protein, 143 aa, Glycine max
  unsure (1)..(143): unsure at all Xaa locations
  Clone ID: PAT_MRT3847_95288C.1.pep
LYEGGFFNAFMSFPPNYPNSPPSVKFTSELWHPNGWSDTFFLSCFDXYMKFNDVVQFAVYPDGRVCISILHPPGDDPNGYELASERWTPVHTVESIVLSIISMLSSPNDESPANVEAAKEWRDRRDEFKKKVSRCVRKSQEML

SEQ ID NO: 280472 - protein, 117 aa, Glycine max
  Clone ID: PAT_MRT3847_95289C.1.pep
PRVRTIFSSSFVSLSIIRSTLQNPFTYTIPYYKYNSTLFAFSLFSSLLSLLLRNLRTEHSRALQLSLSMMASQASLLLQKQLKELCKNPADGFSAGLDDETNIFEWSVTIIGPPDTL

SEQ ID NO: 280473 - protein, 666 aa, Glycine max
  unsure (1)..(666): unsure at all Xaa locations
  Clone ID: PAT_MRT3847_9528C.1.pep
TFSLNRGGGGEEDELYEQLWKACAGPHVEVPRTGQRVFYFPQGHMEQLEVSTKQKLNQRIPLFKWDSKILCRVVNVHLLAEQETDEVYAQICLEPVSXQAEPMSPDPCPAELPSPRVHSFCKVLTASDTSTHGGFSVLRKHATECLPALDMSKSTPTQELVAKDLQGYEWRFKHIFRGQPRRHLLTTGWSNFVTSKRLVAGDTFVFLRGNNGELRVGVRRIAPVQSSMPSSVISSQSMHLGVLATASHXAVATQTLFVVYYKPRASQFIXSVWLGKFHASCNTLANCXLNIEILGTNXVQNYKRFSGTIVGVEDISPHWVNSNWRSLKVQWDEPASFPRPDRVLPWEIEPILASVPTTSSQTAAIKNKRPRQASELADLGDTALASPTFWDAGLTQSDMAKLSVMAEIKRSDSSSHMWHHNSKSSNNGISMNQTEAIWLSSPSQLYHDTTDDSKSISAWPISKPHSERLNNDHFLDQVDKEINKVEAATSYRLFGIDLIDHARNNSLSAENASGITSECKIDVNHVSDISKASKEWNQEQLQLSPKETQSKQVCSRSCTKVQMQGVAVGRAVDLTTLDGYDQLVDELEKMFDIKGQLQLRNKWEIVFTDDEGDMMLVGDDPWLEFCKMVRRIFIYSSQDVHKLSSGSKLPISSMEEIVTSLDTTET

SEQ ID NO: 280474 - protein, 293 aa, Glycine max
  Clone ID: PAT_MRT3847_95290C.1.pep
MDKVVEEVEKVKKEWDETYKKTQEHIEAIADYGKSARAKEENNSLARLNGIAQDGLALLSSFLFTLDLLAPQLPSEPEVQSTRALLQSSKTLTQNLRLNLRNANLQAKANLRKAAQEERELLLGGGEESTVRRRNLQTKAGMTSAAESITESLRRTRQLMVQEVERNTSTLMTLDESTGVLKKAESEYKGHRSLLMRTRNLLSTMQRQDVIDRVIIGVGFLLFSLAVLYVVSKRIGLLTLQRKVTEAIKAGMVGQAELRPQAVADDVNLHQVRGNRVPNNAEAPLEQRIHDEL

SEQ ID NO: 280475 - protein, 64 aa, Glycine max
  Clone ID: PAT_MRT3847_95291C.1.pep
IILCIQIQLTGTSFMHKLSDIDLISTQVDSPSILENSLLTLIIERDLRKNIPVIRMSSQDCDMM

SEQ ID NO: 280476 - protein, 86 aa, Glycine max
  Clone ID: PAT_MRT3847_95292C.1.pep
ISVVFGPFGWHVCSGDFAFSALVYRESLHAGPGAGSSLRVTCIGYKVVTDAAEARDYSPGSFIGGSTWLGSPGFPFSLGLLIMSCF

SEQ ID NO: 280477 - protein, 82 aa, Glycine max
  Clone ID: PAT_MRT3847_95293C.1.pep
AILAIFKIGNSRDMPEIPDHLSSEAKNFIQLCLQRDPSARPTAQKLIEHPFIRDQSATKATNVRITRDAFPYMFDGSRTPPV

SEQ ID NO: 280478 - protein, 161 aa, Glycine max
  Clone ID: PAT_MRT3847_95294C.1.pep
MFLFCKPATQKTVDGPSAKDWRGGRAASFNIIPSSTGAAKAVGKVLPALNGKLTGMAFRVPTVDVSVVDLTVRLEKEASYDEIKNAIKEESEGKLKGILGYTEDDVVSTDFVGDNRSSIFDAKAGIALNKNFVKLVSWYDNEWGYSSRVIDLLVIVAKKSF

SEQ ID NO: 280479 - protein, 47 aa, Glycine max
  Clone ID: PAT_MRT3847_95295C.1.pep
SMYCPQCRMSSKPMGFLVCLTAKLLSGLGHLIAVLPLTSSCQQDTAC

SEQ ID NO: 280480 - protein, 75 aa, Glycine max
  Clone ID: PAT_MRT3847_95296C.1.pep
FRNWKNLKVLFGVTPTPQGFYDTFKGGFHLPIKFGNFLKSDFVRAFFVIFKIGKRGFFAKKLNLVIKRFFQLYSF

SEQ ID NO: 280481 - protein, 125 aa, Glycine max
  unsure (1)..(125): unsure at all Xaa locations
  Clone ID: PAT_MRT3847_95297C.1.pep
RKAMYPIEWLLNAEQSTIAQIEKLHNGQKMINAEASNNDMALLLSMNTVSIHMTTKAXPNQIVFNDKLVVDNTQKFCDGNLTVDSWSPIIVNSQYPVRKIPSKDEILNVTCSRGPVYYQHSTNII

SEQ ID NO: 280482 - protein, 51 aa, Glycine max
  Clone ID: PAT_MRT3847_95298C.1.pep
GRYKALEVAVHSLGFNYLRILMHNEIYKQSLCQERCVMIGLVPSLNAEFDQ

SEQ ID NO: 280483 - protein, 103 aa, Glycine max
  unsure (1)..(103): unsure at all Xaa locations
  Clone ID: PAT_MRT3847_95299C.1.pep
NANQPQEKEGLXGKCPFDTQSRSRWKTVSSTKAQXDSGKTLKYDAIGAWTHCGHDRPDQEEQDKPRLTHARLRHRIDPQYNQVQAHMETNLCKASLDDEDTPK

SEQ ID NO: 280484 - protein, 77 aa, Glycine max
  Clone ID: PAT_MRT3847_9529C.1.pep
PKKKLLRCKQGEVNLGPLKRPPPILSIVNFTVKSFWFVLLCIFSVPLSFLILFFFKKKMQKLILIYARMSIESHSGK

SEQ ID NO: 280485 - protein, 44 aa, Glycine max
  Clone ID: PAT_MRT3847_952C.1.pep
FFLFFFFLGPYLLLLGYRRQSHSRTQVTKCTQLLKYWWEPDRTP

SEQ ID NO: 280486 - protein, 118 aa, Glycine max
  Clone ID: PAT_MRT3847_95300C.1.pep
RSSSVGFDPKHINQGVVVNVGELHESCISNEFLGRATTIIKVECITRRIVLELESLLAPILESLLQRSTHPPKQAPATLLAISIHPFQPLQQAHLHKREASNKDNKNKKVEVVVKMRG

SEQ ID NO: 280487 - protein, 80 aa, Glycine max
  Clone ID: PAT_MRT3847_95301C.1.pep
IILILSTSLSLSSFSMASFKPPPSLYFLRRRGSLQQHFILPYLHHPKTHPLQQKAFLQLNKPSLTQFLPSLDPQSHQHLP

SEQ ID NO: 280488 - protein, 66 aa, Glycine max
  Clone ID: PAT_MRT3847_95302C.1.pep
TNHVKETDSRSLCPAQSVIFFPLRIRTPHSRNPFRDSWNPVTIAFVSGFKVRQPMIAVSPKYRTRS

SEQ ID NO: 280489 - protein, 93 aa, Glycine max
  Clone ID: PAT_MRT3847_95303C.1.pep
HSYTLDHQQEEKLFLDISSGLTQLTQLHELLYKKNWSDHITNCFSNYAGCYDIDTVQNYNELSTKIQGMCKSIRVTLDQHILREELESWPLFD

SEQ ID NO: 280490 - protein, 85 aa, Glycine max
  Clone ID: PAT_MRT3847_95304C.1.pep
GQELGINMIHPLNGRGFWYKDKHFALIIVLYTKDFTCAYNHIHGICYAQYTPGLNNTPSVGLLRKINVLISFATLLTLYWTVRAK

SEQ ID NO: 280491 - protein, 35 aa, Glycine max
  Clone ID: PAT_MRT3847_95305C.1.pep
NTTPYWEKFNLYATTIPNPSFNKLLKTNIYKRKTC

SEQ ID NO: 280492 - protein, 54 aa, Glycine max
  unsure (1)..(54): unsure at all Xaa locations
  Clone ID: PAT_MRT3847_95306C.1.pep
SAEGGVVTRTKTXTLARGLPPGPFTFFPSLKATSTGCPRXALNGGLPGGPQISE

SEQ ID NO: 280493 - protein, 84 aa, Glycine max
  unsure (1)..(84): unsure at all Xaa locations
  Clone ID: PAT_MRT3847_95307C.1.pep
FMNEGSLIGPLNGSNYXPSCDDKHGDRTLVCDAPMKILMEXFQRLRTMKGSRLTKSSTNSGALVPELMLVAKLCVPDTTTIASI

SEQ ID NO: 280494 - protein, 47 aa, Glycine max
  Clone ID: PAT_MRT3847_95308C.1.pep
ITCVVASIFLFFFWFVLIVSVNNFASWCHLYLNTVKLMPTQPFKILL

SEQ ID NO: 280495 - protein, 104 aa, Glycine max
  unsure (1)..(104): unsure at all Xaa locations
  Clone ID: PAT_MRT3847_95309C.1.pep
LAKHNMDNRMNSAHWETINXLVELLTSTDTTMQKKAATALLILSDADLYRSARAGAGAKAPMMDVLQTESPEPXDNLPDCLISLSTIEENMICIWRHWAMGPLV

SEQ ID NO: 280496 - protein, 222 aa, Glycine max
  unsure (1)..(222): unsure at all Xaa locations
  Clone ID: PAT_MRT3847_9530C.1.pep
MELHKSTHVVLLSSPGLGHLIPTIELGKRFVHHHNFQVTVLAVTSQTSKTETEILNSSLCHIIDIPSPDLTGLVNENNGVMTRLSVMMSEAVPAIKSILSKITPRPSALIVDIFGTEAIPIARELNILSYVYVASHAWVLALIVYAPVLDEKIEGEYVDQKEALKIPGCNPVRPEDVVDSMLDRNDRKYKEFLKIGNRIPXSDGLLVNTXEELQRXVLEALR

SEQ ID NO: 280497 - protein, 118 aa, Glycine max
  unsure (1)..(118): unsure at all Xaa locations
  Clone ID: PAT_MRT3847_95310C.1.pep
QTKRFSSIIGAVNCSSENFKVQSPNVKDTVTDIQFVYIYETKKLVHENRSGTYHWIVIPKPENYQFKTISERAKLGGEKSVXCGVNNGCTITCGVIANREGISXTTKDKRGEANHFGS

SEQ ID NO: 280498 - protein, 85 aa, Glycine max
  Clone ID: PAT_MRT3847_95311C.1.pep
KAVNDGLWLQMLLSQRVQEIAADTCKVCSLMSMACTCQKQFAFSHGASTTGSYAQEHNQNIMPGNAGNIYVAESSAGERNGRFRP

SEQ ID NO: 280499 - protein, 482 aa, Glycine max
  Clone ID: PAT_MRT3847_95312C.1.pep
KLLLQARKFQNLPPGPPSLPIIGNLHHLKRPLHRTFRALSDKYGHVISLWFGSRLVVVVSSQTLFQECFTKNDVVLANRPRFLSGKHIFYNYTTLGSSPYGEHWRNLRRITALDVLSTHRLHSFAAIRRDETHRLVRKLAEAQGSESSLSFAEVELTSKFYDMTFNNIMRMISGKRYYGDDCDMADVEEAKQFRAMVSELLKLAGANNKNDFMPVLRLFDFENLEKRLKKISNKTDTFLRGLLEEIRAKKQRANTMLDHLLSLQESQPEYYTDQIIKGLALGMLIAATDSQAVTLEWALSCVLNHPEVFKRARDELETHVGQDHLLEESDLSKLPYLKNIIYETLRLYTPAPLLLPHSSSEECIIGGFKVPGDTIVLINAWSIHRDPKVWSEATSFKPERFEKEGELDKLIAFGLGRRACPGEGLAMRALCLSLGLLIQCFEWKRVGDKEIDMREESGFTLSRLIPLKAMCKARPVINRLGK

SEQ ID NO: 280500 - protein, 59 aa, Glycine max
  unsure (1)..(59): unsure at all Xaa locations
  Clone ID: PAT_MRT3847_95313C.1.pep
SRGGTHCYCSSASHAKKNNIGKNYNYAYLWVGNSETQCPGQGARPFHXPIYGPLCPPLV

SEQ ID NO: 280501 - protein, 95 aa, Glycine max
  Clone ID: PAT_MRT3847_95314C.1.pep
LGLRQVLGHLNKAGLFVGFKAVLFDGFGGLQSTLLEPPFFLPWLTSSNNLLGICIRKQSLGDLLYGKTGGKVNDHGGRKLGSEPGLLFEQLQPTF

SEQ ID NO: 280502 - protein, 195 aa, Glycine max
  Clone ID: PAT_MRT3847_95315C.1.pep
GAVRERKREERERKGRERDDVTIGAGEQRRREQQDPCGEVRAGSVRRCMGSPLVLKVTAGSLCGQPFEMWEKKKDRLQNQSKMEFSQTDLFCHLQRSLDALEDEFHIHEKVCFMDLGLFPEDQRIPVPALIDMWAELYELNNDGSNAMAIIHDLTTRNLINFIVTRKVSKDEDKYYNNHFVILHDLLRELAIRQS

SEQ ID NO: 280503 - protein, 274 aa, Glycine max
  Clone ID: PAT_MRT3847_95316C.1.pep
RSASNTLFLTHCGAKADLWSCGVILFVLMAGYLPFEETNLSALYKKIFKAEFMSPPWFSSSAKKLINKILDPNPATRITFAEVIENDWFKKGYKPPVFEQANVSLDDLDSIFSDSTDSQNLVVERREEGPMAPVAPVTMNAFELISKSQGLNLSSLFEKQMGLVKRETRFTSKCSADEIISKIEKAAGPLGFDVKKNNCKLKIQGEKTGRKGHLSVATEILEVAPSLYMVELRKSEGDTLEFHKFYKNLATGLKDIVWKAEPIDEEKDGANPSK

SEQ ID NO: 280504 - protein, 124 aa, Glycine max
  Clone ID: PAT_MRT3847_95317C.1.pep
SPLLFLFQHKHFPFRFFFLQIQTKPEQTKKGKEKSQNPQRYFLSLLARGKKINLKGFLLISLETSFYFPLFSSSRSFVRSSDYYSSIRIDDGVLLRSNGQRLTTPIPFQRPRLNRRDPSVNGLF

SEQ ID NO: 280505 - protein, 63 aa, Glycine max
  Clone ID: PAT_MRT3847_95318C.1.pep
PKAFDMNLGDNMEAIELNMHDYVGVDPLGLPVLLKLGSFRASAFFFFFFFFFAIPFVVFSHLL

SEQ ID NO: 280506 - protein, 273 aa, Glycine max
  unsure (1)..(273): unsure at all Xaa locations
  Clone ID: PAT_MRT3847_95319C.1.pep
IGHDVTPPYTPQHNGAAERXNQTVMNMVRCKLNGKKLPKFLWVEAVSTAVYVLNRSPTKRLNKITPEEAWSGCKPVVSHFKIFCSICYKHVPDQLRKKLDSKSEIMILLGYHAIGGYKLFNPVTKEVLVSRDMVVDESKDWNWDKEMVEKPTKVVIEAPIDEPSDYFAVVIDDSDQGRVRKSQRARQVSSRLQDYELIHDSAIGEEGELVHLALFAESESVSLETAMNDTKWIDAMKEXYKXIVKNDTWQLVPQPAYKKPPCSIVGLRVILIE

SEQ ID NO: 280507 - protein, 98 aa, Glycine max
  Clone ID: PAT_MRT3847_9531C.1.pep
ALSDGQEQYSPGEILSGVSSSLETNHYMYNRSISTLDSFPLYSDRNSLLQNASSNQKIQHALLELETALMAPDDDQVTTPNTLAERHRSWNNENHVSQ

SEQ ID NO: 280508 - protein, 711 aa, Glycine max
  unsure (1)..(711): unsure at all Xaa locations
  Clone ID: PAT_MRT3847_95320C.1.pep
MMSVMDNNAKIFDVLEFVAGGELFDKLKIELLKDGMSALVLTGLPGSGKTTLAKKICWDTDIKGKFGVNIFNTVLKTSDLGCIVLTELDRGRRPVHAFHSKDNDINPXRTLNQSYGGAKADLWSCVVILFVLMAGYLPFEYTNLSALYKKIFKAEFTCPPWFSSSAKKLINKILDPNPATRITFAEVIENDWFKKGYKPTVFEQANVSLDDLDSIFSDSTDSQNLVVERREEGPMAPVAPVTINAFELISKSQGLNLSSLFEKQMGLFKRETRFTSKCSADEIISKIEKAAGPLGFDVKKNNCKLKIQGEKTGRKSHLSVATEILEVAPSLYMVELRKSEGDTLSRKVSKDEDKYYLNHFVILHDLLRELAIRQSTEKPFEQDRLIIDITGNDFPEWWVGENQQGTIGQMFPCFCRMIRQKQLKVAARILCISTDETFNSDWRDMKPYNTEVLILNLHSSQYSLPCFTKKMKKLKVLIVTNYGFHRSEIKKFELLGSLSNLKRIRLEKVSVPSLCELKNLQKLSLRMCNTRQAFENCSIQISNAMPYLEEMSIDYCNDLITLPDGLCEISPLKKLSITNCHKLSALPQGIGKLENLEVLRLCSCSDLLEMPNSFEGLNKLSCLDISDCVSLTKLPDDIGELKKLKKLYMKGSKLGELPYSVHKFEQFKHEINVICDEETVTLWENFRAFPNLKIEIFREDIDLNWLHGVHS

SEQ ID NO: 280509 - protein, 95 aa, Glycine max
  Clone ID: PAT_MRT3847_95321C.1.pep
RLCTLLRHSRSSWSSSEVGGGGNDGVAGEEERVLRRNIIFGGGIIVGARDGDHAGSGERVHVLLEAVVIIVVARRWRRDCPFRNRRREESLNRDC

SEQ ID NO: 280510 - protein, 89 aa, Glycine max
  Clone ID: PAT_MRT3847_95322C.1.pep
VDQINRLFRLITSRIEGEWEKAFSSPSFHSYLVPRIPSPLRTTTQDCWITHQCHPLKMMALAKPMLTWLTLTPRGKGFLMAFPAYEVLN

SEQ ID NO: 280511 - protein, 66 aa, Glycine max
  Clone ID: PAT_MRT3847_95323C.1.pep
LIHILNCAIGPLPKHNSLIHSPSITRSCKPFYIWPGTQILHYSNYFGFTSKFTPESIIAKINLILK

SEQ ID NO: 280512 - protein, 162 aa, Glycine max
  Clone ID: PAT_MRT3847_95324C.1.pep
MTITVFLVPPTPHLCNYKNSWPISTYPSLSSSSSKLIVPLCSPSPPTSIIEEGPSPSPDELPVVVDSSEFTSGCKACGREEIEQGCNGEGRIQGGIATVPGLGWWPIKAYRPCPAFMASGGRYRRQGQSMDEVVSGSGKSKTPTTTDSNTSIKKESSKKAKR

SEQ ID NO: 280513 - protein, 165 aa, Glycine max
  unsure (1)..(165): unsure at all Xaa locations
  Clone ID: PAT_MRT3847_95325C.1.pep
MTTGIVRDQNLEKHIHKQMGCMAGFLQIFDRHQMLTGKRIYSPKRLPPASPEPENPAVSPARSTPSPAREVTSSEPQANVPTLPVLEFKEGTRSSWKFSREAPRLSLDSRAIVDAKGTLHLHPREIPPENDADNXRRSTSVIAKLMGLEPLPDSEPRPGPRPVAK

SEQ ID NO: 280514 - protein, 81 aa, Glycine max
  Clone ID: PAT_MRT3847_95326C.1.pep
KGGGLLSPQNTFLVFPIKKHRLSHFFVYKSSLSPKTISITFKFQLNFSTKSFPKSFFLIGESVCTLSLLVKPRKLTRGNKG

SEQ ID NO: 280515 - protein, 225 aa, Glycine max
  unsure (1)..(225): unsure at all Xaa locations
  Clone ID: PAT_MRT3847_95327C.1.pep
MFLFRKFNVHSLILKPWQNPRFLSTKKKPPKSGTKFIGKAALKEAQAALLEYLHSTRSLNIVDAENMCRNSPSFLHDLLAKSQSQTLTRHVDNNNNNNSSSSSSTTTTTKRSISRYLRYHPINEFEPFFESAGLTPPEYAPFLPRDMIYLNDDALLMENYHALCNYGVPRTKMGRLFKLTPQLFRYKPGVXISKLRDYEKLGVARRTLACVVASSPCILVGGVDV

SEQ ID NO: 280516 - protein, 84 aa, Glycine max
  unsure (1)..(84): unsure at all Xaa locations
  Clone ID: PAT_MRT3847_95328C.1.pep
MDTSNFSIVLSVSLSLXMVLLTKAHSSDSVSFTFNTCNSVQPYIMLQIDASIASSGVLQLTTVGSNGVTTSESLGRALYAAPIQ

SEQ ID NO: 280517 - protein, 52 aa, Glycine max
  Clone ID: PAT_MRT3847_95329C.1.pep
RELLHIEFDLIMHLIMFYTHCLVLYVILVNRSTIDQTLDQNGFSTRSAISRH

SEQ ID NO: 280518 - protein, 57 aa, Glycine max
  unsure (1)..(57): unsure at all Xaa locations
  Clone ID: PAT_MRT3847_9532C.1.pep
NSDPQETSISSLPRDIHGAPPESLVVKLAEVIGNFKTLRGMSLFWFXVVDELRKHWS

SEQ ID NO: 280519 - protein, 102 aa, Glycine max
  Clone ID: PAT_MRT3847_95330C.1.pep
IAQPGAALAVYVLSPSNAACRTPDVQVSCSCLACRIIHNVMRMRYFRNGFICVSIAIFFCEHRFSCFNHPVGWEHGCPSCHSKSPSSSNCCYLPYNPCNLLV

SEQ ID NO: 280520 - protein, 74 aa, Glycine max
  Clone ID: PAT_MRT3847_95331C.1.pep
INLLTITLCYRHLLNAYCIGRTHYILPGMDTYQLRSHSTSLTVLVLQISIVRLIAAHNTPRILIDKYSALDFSF

SEQ ID NO: 280521 - protein, 74 aa, Glycine max
  Clone ID: PAT_MRT3847_95332C.1.pep
QSWCPTRRKLEEVERSLLMPPGRRFCFCRGRRDSIGYIAKGTLLLVRKLIDLFHKLQNYCLFSKEIRFLICRAL

SEQ ID NO: 280522 - protein, 61 aa, Glycine max
  unsure (1)..(61): unsure at all Xaa locations
  Clone ID: PAT_MRT3847_95333C.1.pep
XSTXXSDTXLWRCXRQSXQDXRQXSLLXXLVAHLEHPRQPFWGRPXRXPVXLSSLQQHXLA

SEQ ID NO: 280523 - protein, 71 aa, Glycine max
  unsure (1)..(71): unsure at all Xaa locations
  Clone ID: PAT_MRT3847_95334C.1.pep
GSKTTQVPPHSVQXHTTTHRYXSLLAPPGALLKRPRYENPLKPPSIIQYQRCTTTCKILFLLTYLPTRTSC

SEQ ID NO: 280524 - protein, 51 aa, Glycine max
  unsure (1)..(51): unsure at all Xaa locations
  Clone ID: PAT_MRT3847_95335C.1.pep
XSVXSTYXTSLXYMYKLLXRXLLXXQGSXVHXCLSPLCLICWGXXXXLLXC

SEQ ID NO: 280525 - protein, 68 aa, Glycine max
  Clone ID: PAT_MRT3847_95336C.1.pep
INYLTSESVIICGYHKAWQCEALLWSHHIQDKRRKSPLTRKGFAIAIQYSHGSPYYNVPRFLLNKANL

SEQ ID NO: 280526 - protein, 129 aa, Glycine max
  unsure (1)..(129): unsure at all Xaa locations
  Clone ID: PAT_MRT3847_95337C.1.pep
TANVNVSAESLRLTGLLREPTPVPMVDPTESTSWPIYKAGHTXIEVTFLSLYITGLTTLGVIMAKXKELSVEMQGXVACANSGMIIVLVYCNAGMSGGHMKPSMTLWLFLARKLNLPIAIRCTXMQCLG

SEQ ID NO: 280527 - protein, 75 aa, Glycine max
  Clone ID: PAT_MRT3847_95338C.1.pep
VRSLNHTDEASIGHNVLLKCRPSFPNPRASRLHPVRDGLVHLKIISQCRQSHQNCARLQMSYPNRHLSVVMVPRA

SEQ ID NO: 280528 - protein, 86 aa, Glycine max
  Clone ID: PAT_MRT3847_95339C.1.pep
GHSASSEVNWGSHRRNVLAPQVSGQQALDVAEHELVAGRQGPECDVVQVTAASALGPMSTTSSATCASAHVADFSIDLATRKVPTP

SEQ ID NO: 280529 - protein, 41 aa, Glycine max
  unsure (1)..(41): unsure at all Xaa locations
  Clone ID: PAT_MRT3847_9533C.1.pep
WIILPRVLLSDYEPLSHXXRSRGEKIIHWMMDYFRTRAVAP

SEQ ID NO: 280530 - protein, 69 aa, Glycine max
  Clone ID: PAT_MRT3847_95340C.1.pep
GLNLIFAFEKLCFFYKDLKLSSDSLCKSLISIFLSLTSSDDNFVVYEKVVNCENHNSNPLLVIFVFTLV

SEQ ID NO: 280531 - protein, 69 aa, Glycine max
  unsure (1)..(69): unsure at all Xaa locations
  Clone ID: PAT_MRT3847_95341C.1.pep
MHNPKVFFDDDQTGXQSDGRIVMELYADGTPLTGENFRALCTGEKGLRRSGXPIHYKGSGLHRMIPSGM

SEQ ID NO: 280532 - protein, 79 aa, Glycine max
  unsure (1)..(79): unsure at all Xaa locations
  Clone ID: PAT_MRT3847_95342C.1.pep
XPXPEIGFXVLXXFLCXKXTXXXKIXKXXTNGWKGXLDVXLGKTSXRVSXWXXXXXFGFQGGXSGSXPIXKLGCSLPGA

SEQ ID NO: 280533 - protein, 45 aa, Glycine max
  Clone ID: PAT_MRT3847_95343C.1.pep
YFFFFLLFFNLERKKKIAGSIMFAMYTPPCFHKPEAWTTFITQIY

SEQ ID NO: 280534 - protein, 34 aa, Glycine max
  Clone ID: PAT_MRT3847_95344C.1.pep
FMCTNKYNCDLNRINELRCIRYVLASCKRRRPSS

SEQ ID NO: 280535 - protein, 58 aa, Glycine max
  Clone ID: PAT_MRT3847_95345C.1.pep
HKDQTHVVRKHQTNFEGCQKHHCGVKLAIIQKCKLNMSQMRSGTRTSIYFQNKDVFHV

SEQ ID NO: 280536 - protein, 73 aa, Glycine max
  Clone ID: PAT_MRT3847_95347C.1.pep
EIIQLPISDKSLNYFVTAHKLQKPIISRYLSADGQSQLGNSTQPLMSPEVCPAEKMHQSNFSYKVSFGSIIML

SEQ ID NO: 280537 - protein, 128 aa, Glycine max
  unsure (1)..(128): unsure at all Xaa locations
  Clone ID: PAT_MRT3847_95348C.1.pep
DVISYAFTDGEEVAAAVSDLCPLLALSIILNGIQPVXSGVAVGCGWQTFVAYVNVGCYYGIGIPLGSVLGFYFKLSAKGIWLGMLGGTVLQTIILVWVTFGTDWNKEVEEAAKRLNKWEDKTEPLVNN

SEQ ID NO: 280538 - protein, 91 aa, Glycine max
  Clone ID: PAT_MRT3847_95349C.1.pep
VKGVAGCGWQTFVAYVNVGCYYGIGIPLGSVLGFYFKLSAKGIWLGMLGGTVLQTIILVWVTFGTDWNKEVEEAAKRLNKWEDKTEPLVNN

SEQ ID NO: 280539 - protein, 38 aa, Glycine max
  Clone ID: PAT_MRT3847_9534C.1.pep
TLNLQLVQQIKVIPLQTVFSLMAYHICTYTKSYKGIKC

SEQ ID NO: 280540 - protein, 363 aa, Glycine max
  Clone ID: PAT_MRT3847_95350C.1.pep
PWKILFEKLLSQFPQVIPWSFAIVIISLHVSSVSLPNYESIPAVIVFGDSIVDTGNNNYITTIAKCNFLPYGRDFGGGNQPTGRFSNGLTPSDIIAAKFGVKELLPPYLDPKLQPQDLLTGVSFASGASGYDPLTSKIASALSLSDQLDTFREYKNKIMEIVGENRTATIISKSIYILCTGSNDITNTYFVRGGEYDIQAYTDLMASQATNFLQELYGLGARRIGVVGLPVLGCVPSQRTLHGGIFRACSDFENEAAVLFNSKLSSQMDALKKQFQEARFVYLDLYNPVLNLIQNPAKYGFEVMDQGCCGTGKLEVGPLCNHFTLLICSNTSNYIFWDSFHPTEAAYNVVCTQVLDHKIKDFF

SEQ ID NO: 280541 - protein, 111 aa, Glycine max
  unsure (1)..(111): unsure at all Xaa locations
  Clone ID: PAT_MRT3847_95351C.1.pep
IIVWDLALFFMALLVIEQMLIFAKTLTGKTITIEVECFDTIDNASASIXDKEGIRPDQHRLIFACIQLDDGRTLVDYNIRQESTLDLVLNLKAGIQIFAYNCTVNILDLEE

SEQ ID NO: 280542 - protein, 39 aa, Glycine max
  Clone ID: PAT_MRT3847_95352C.1.pep
TRTRFRSQSGCRKRIGDCIVSAYQVVVNWCCLLSPVKTP

SEQ ID NO: 280543 - protein, 153 aa, Glycine max
  Clone ID: PAT_MRT3847_95353C.1.pep
MVSNTSQSLFQLSLFSTMACTTVVLTLVAALLVTSVVAQSPASSPALSPKRTPVATPQKSPSPAISPSAVSPSSSPPAPVVNTPSPSPNSVDSPPSPPQSPSVSPAGVPSVTPSAISAPPTGAPAPSQNGAALNRFTVAGSAAVVVFAAALLM

SEQ ID NO: 280544 - protein, 60 aa, Glycine max
  unsure (1)..(60): unsure at all Xaa locations
  Clone ID: PAT_MRT3847_95354C.1.pep
LRWTFFTQQTNCLGTPXEIWCLAYIVSDINLRINYFYYPYNKLLLYGCSLPTYYPEIYRI

SEQ ID NO: 280545 - protein, 59 aa, Glycine max
  Clone ID: PAT_MRT3847_95355C.1.pep
KHQLKDYYQSSSDMVDFHLSAVTHALHSEDNYLRIQVMFEIFVNKKMLVFYLRMLIRVI

SEQ ID NO: 280546 - protein, 109 aa, Glycine max
  unsure (1)..(109): unsure at all Xaa locations
  Clone ID: PAT_MRT3847_95356C.1.pep
GYDPTNPTDKTLDSGRTPFSFTMTGTALPIMLDQQQLEHVWRPKQLRXVGDTLTPAARPLSGQPYDTLTLGSCMAKRIICSDLAVTLKSDGELIRLTIPQLTSEMPKEL

SEQ ID NO: 280547 - protein, 224 aa, Glycine max
  Clone ID: PAT_MRT3847_95357C.1.pep
MAPRGATLLFLLCALCYSLIAIAGKSYYDILQLSKGASDEQIKRAYRKLALKYHPDKNPGNEEANKKFAEISNAYEVLSDSEKRNIYDRYGEEGLKQHAASGGRGGGMNFQDIFSTFFGGGPMEEEEKIVKGDDLVVDLDATLEDLYMGGTLKVWREKNVLKPAPGKRRCNCRNEVYHKQIGPGMFQQMTEQVCEQCPNVKYVREGYFITVDIEKGMQDGQVTF

SEQ ID NO: 280548 - protein, 344 aa, Glycine max
  unsure (1)..(344): unsure at all Xaa locations
  Clone ID: PAT_MRT3847_95358C.1.pep
MAHRGATLFFLLFAICYSLIAIAGKSYYDILQLSKGASDEQIKRAYRKLALKYHPDKNPGNEEANKKFAEISNAYEVLSDSEKRNIYDRYGEEGLKQHAASGGRGGGMNFQDIFGSFFGGGQMEEEEKIVKGDDVVVDLDATLEDLYMGGTLKVWREKNVLKPASGKRRCNCRNEVYHKQIGPGXMFQQMTEQVCEQCPNVKXVREGYFITVDIEKGMQDGQEVLFYEDGEPIIDGESGDLRFRIRTAPHDDFRREGNDLHSTVTITLVQALVGFEKTIKHLDEHLVDISTKEITKPKQVRKFKGEGMPLHMSNKKGDLYVTFEVLFPTSLMEEQKTKIKAILG

SEQ ID NO: 280549 - protein, 82 aa, Glycine max
  Clone ID: PAT_MRT3847_95359C.1.pep
RLELEPIRLETQSNTALCTNEIWTRVVALQQNHLSFSTLASSLSDFRGTRLQTQLQFKRKQCHPKGSFYVSASSTKKILIMG

SEQ ID NO: 280550 - protein, 98 aa, Glycine max
  unsure (1)..(98): unsure at all Xaa locations
  Clone ID: PAT_MRT3847_9535C.1.pep
LQALMNLLSLCWKPYGRDADRIESFGVIGREGKGGLLWFRHFGKYGSSDFSMAADQANQLLEDHSQIESGPLGTLGGIYDGHGRPDAXRYVCDHSFRH

SEQ ID NO: 280551 - protein, 121 aa, Glycine max
  unsure (1)..(121): unsure at all Xaa locations
  Clone ID: PAT_MRT3847_95360C.1.pep
ALLEWKSARGDEGSDYHIQIGEQYLANVVKESVRCLNAXHAGKVYYVQDWQETMDTELDTHKLEHGPKKRKIPYCNNNEDDDDVEDINAXEDDMTDDELDDDSGRMIDDTAKTEACNASTD

SEQ ID NO: 280552 - protein, 109 aa, Glycine max
  unsure (1)..(109): unsure at all Xaa locations
  Clone ID: PAT_MRT3847_95361C.1.pep
AKNAVVMNMPNADLSMRGYFVGNLVYQVHKMTSRYIKCTRSLFIAFHNLADDTINIEAYSHKLGQLVAIQETAELTCXQQEFVTAXSTQVRTATTVLADGCPYSYAMVH

SEQ ID NO: 280553 - protein, 66 aa, Glycine max
  unsure (1)..(66): unsure at all Xaa locations
  Clone ID: PAT_MRT3847_95362C.1.pep
VVATAASAVLASNAMAIEVLLGGDDRSLAFIPNNFSMASGEKIIFKNNTXFPHNIIFDEDEIPSSM

SEQ ID NO: 280554 - protein, 79 aa, Glycine max
  Clone ID: PAT_MRT3847_95363C.1.pep
LKIWCNQKEVFYFIFALSPRTCTHMLIAMGKLQDNSKCATFKRLLKQFQINLTINYKISAEYNVFFIINNIKILYASPT

SEQ ID NO: 280555 - protein, 114 aa, Glycine max
  Clone ID: PAT_MRT3847_95364C.1.pep
PTKFDKILGHWIVLLLLMMTRFVRLGTRKVLPHNLCVAYNCMRYSTEQRTKCCLRRALTGSLSFIGFISKVINPHTAVAATCSICTYNENECHVSHTLHDLDFSSISNSKDWEG

SEQ ID NO: 280556 - protein, 49 aa, Glycine max
  Clone ID: PAT_MRT3847_95365C.1.pep
KGGAPPKKKRIIPSKRDPTLILSKKGVTPPFPYHDPHSPGGKTPWPNKS

SEQ ID NO: 280557 - protein, 84 aa, Glycine max
  unsure (1)..(84): unsure at all Xaa locations
  Clone ID: PAT_MRT3847_95366C.1.pep
VSIPSFTGLKAXAGKVSAAAXKSQLPKPQGSAGIXGSXXDGXXXFXATAXSAVLASNAMAIEVLLGTDDGSLVXSXXSLAXGXW

SEQ ID NO: 280558 - protein, 72 aa, Glycine max
  Clone ID: PAT_MRT3847_95367C.1.pep
SSYSSSLCINQSTTILFTIIYHFQFVAHFTIYVFFISIRYPTNTFRPTLVVVPLQFPSLVLYQANPLSYSIK

SEQ ID NO: 280559 - protein, 83 aa, Glycine max
  Clone ID: PAT_MRT3847_95368C.1.pep
VSVAICFRSHNVQWGPAPEPPRQIFLFGLVPPVANLSSHQSMAGHYPAYSHQFHQEHKKGGLRSPFGAKAASCHNDHGMKPQN

SEQ ID NO: 280560 - protein, 47 aa, Glycine max
  Clone ID: PAT_MRT3847_95369C.1.pep
YTHGVESRDLNLVIIDNLLYKHCIPFCDGHHISLPSLIMLVISYFGG

SEQ ID NO: 280561 - protein, 48 aa, Glycine max
  Clone ID: PAT_MRT3847_9536C.1.pep
LIFATILRGLTGYIDAMPSYVFSRIGFAEFKTLYLRLWYFIPRSFLSF

SEQ ID NO: 280562 - protein, 118 aa, Glycine max
  Clone ID: PAT_MRT3847_95370C.1.pep
HGYRTIVGERGLPLCLGQKQRVPIAPPLVHHRELLLVHEASSPLDLESERVAQDALDRVMVVRPTSVVGHRLSPIKDADSIPVGQNGVHGEQGKHVPLLTKGGIYASLVGLHTNLGSF

SEQ ID NO: 280563 - protein, 140 aa, Glycine max
  Clone ID: PAT_MRT3847_95371C.1.pep
FISLMLTEAEKTNMFEHTSYFTIYKTKLLGSFGTKSFSVCATLILVVTETQVTELFICLQKLIQKYIFSSNILMALQQYNIHYMEILDYSQTQCIDATGLGALLHCHMIFWYRNCLEGIKFNKECPNLHRSKFNHQLRRI

SEQ ID NO: 280564 - protein, 54 aa, Glycine max
  unsure (1)..(54): unsure at all Xaa locations
  Clone ID: PAT_MRT3847_95372C.1.pep
LXXXKIGLXXGEXIRCLXRXISPRCXPKXWPANSSGKPXXRSCXISILMQMQSS

SEQ ID NO: 280565 - protein, 113 aa, Glycine max
  unsure (1)..(113): unsure at all Xaa locations
  Clone ID: PAT_MRT3847_95373C.1.pep
SWAFKPWHKARKNALRQPQGKNQLFSAWGGWIQKGPERVHENIRNRQLLIIPESGFHVIIQNLVVALLXRLALNLVGKLGQHNLFETVELRRVQPRHRVGSLELQAIRRRILR

SEQ ID NO: 280566 - protein, 41 aa, Glycine max
  unsure (1)..(41): unsure at all Xaa locations
  Clone ID: PAT_MRT3847_95374C.1.pep
XXSRNNFXGXTISTSXYXXXXXVXLTSNKQTLPHEAHIXXX

SEQ ID NO: 280567 - protein, 68 aa, Glycine max
  Clone ID: PAT_MRT3847_95375C.1.pep
PPPFMAHEKVPPFFSTPTPIERMFFHKEHPAKKRALSQLAPRQKKRPLQRGASSSITLEGFGDPSPLI

SEQ ID NO: 280568 - protein, 84 aa, Glycine max
  Clone ID: PAT_MRT3847_95376C.1.pep
KVYCSPYRLVNAHVAVVTVMQALHARLGTEFEASCQLWFSRMGTHIHALFGVGAERTIQARDREICPRCSVRKSFIESKTDSAS

SEQ ID NO: 280569 - protein, 54 aa, Glycine max
  Clone ID: PAT_MRT3847_95377C.1.pep
KKNCGYKKIGPQTNFFYNKNLFMYKRLKHFLKVFWHKNRAKNFISHNWFFLLKV

SEQ ID NO: 280570 - protein, 79 aa, Glycine max
  unsure (1)..(79): unsure at all Xaa locations
  Clone ID: PAT_MRT3847_95378C.1.pep
KRPSIYFMQSLQIYNAIEKTKKAHFSSKNXXSTPELMDLGFKTASXSRGLASSKLDGYDFRILSRVXLPCWDTICCNRA

SEQ ID NO: 280571 - protein, 90 aa, Glycine max
  unsure (1)..(90): unsure at all Xaa locations
  Clone ID: PAT_MRT3847_95379C.1.pep
GDKTVVLDMYTQWCGPCKVMAPKFQELSEKYLDVVFLKLDCNQENRPLXKELGINVVPTFKILKDNKVVKEVTGAKYDDLVDAIDKVRSS

SEQ ID NO: 280572 - protein, 233 aa, Glycine max
  Clone ID: PAT_MRT3847_9537C.1.pep
PHGHIAIELYQEQGRKTSISHDKLLLGAAREAVQAQWELDLLRRILLDNGGGRDVCGKDGLLAKALKMRVEMERARREFLCSPSQALKMESTFDATNERECNICFFDLHLSAAGCRCSPDRYACLDHAKQFCSCSWDSKFFLFRYDISELNILVEALEGKLSAIYRWAKSDLGLALSSFVSASKETIHKELKSDSSNLSHSSRATGHKEMGHPLNKYIDNSQLDEGPYKESTK

SEQ ID NO: 280573 - protein, 181 aa, Glycine max
  unsure (1)..(181): unsure at all Xaa locations
  Clone ID: PAT_MRT3847_95380C.1.pep
MALNLCISPKFKWVPSPASLDSASSLRPSLGSCFGNINIASVSLSTSRSLSLRRSGSVSVRSSLETXGPTVTVGQVTEVNKDTFWPIVKAAGDKTVVLDMYTQWCGPCKVMAPKFQELSEKYLDVVFLKLDCNQDNRPLAIELGIKVVPTFKILKDNKVVKEVTGAKYDDLVDAIDKVRSS

SEQ ID NO: 280574 - protein, 216 aa, Glycine max
  unsure (1)..(216): unsure at all Xaa locations
  Clone ID: PAT_MRT3847_95381C.1.pep
QGTFFGAVATREKLLIRLXADRLLTATIAWPFPSLIKIGIILSTMGAALQSLTGAPRLLAAIANDDILPILNYFKVGDGGEPHVATFFTAFLCIGCVVIGNLDLITPTVTMFFLLCYTGVNLSCFLLDLXLDAPSWRPRWKFHHWSLSLVGALLCIVIMFLISWSFTVVSLLLASLIYKYVSIKGKAGDWGDGFKSAYFQLALRSLRSLRASLLPQ

SEQ ID NO: 280575 - protein, 64 aa, Glycine max
  Clone ID: PAT_MRT3847_95382C.1.pep
SGPLNILMAPIREGPLVQGYFPWSLLPPFECLFGFSVRFGLPPVDFSPLKTPPNFSPLWFHPFL

SEQ ID NO: 280576 - protein, 49 aa, Glycine max
  Clone ID: PAT_MRT3847_95383C.1.pep
TFIVILRNILNNNLLNYNVRYYIMRKATNTLFWTVNTLSLVEIYWKPQF

SEQ ID NO: 280577 - protein, 88 aa, Glycine max
  Clone ID: PAT_MRT3847_95384C.1.pep
GRFKNIGEIKEKTVSWKKLYSVKNPTYYTTGKKKEKTPGGLLKKLTHIIWGGRHPPFSKKKTRGAGFFNKWATPREKGPYGLGPKVFF

SEQ ID NO: 280578 - protein, 84 aa, Glycine max
  Clone ID: PAT_MRT3847_95385C.1.pep
VEASVAFGENESDGGVKENVRFGEKKGEPQARESIQQEEEPCGTTNKNRKGRTLLTLLSISSATLVSLVPLFVCSFLLRPPSSP

SEQ ID NO: 280579 - protein, 47 aa, Glycine max
  Clone ID: PAT_MRT3847_95386C.1.pep
DENIPKAQSALLVRCKANSEATLGTYKGDATLGEGASESLHVKDYKY

SEQ ID NO: 280580 - protein, 358 aa, Glycine max
  unsure (1)..(358): unsure at all Xaa locations
  Clone ID: PAT_MRT3847_95387C.1.pep
MSSFKSKYQDELIANATYIGTPGKGILAADESTGTIGKRLASINVENVETNRRILRELLFTAPGCLECLSGVILFEETLYQKSAAGVPFVDILKKGGVLPGIKVDKGTVELAGTNGETTTQGLDDLAQRCKKYYEAGAWFAKWRALLRXYGIRLFLWACFGYSRVFFKKFLLKRKEILQNTSSIVSREGPHDIAKCADVTXRVLAXACYKALNDHHVLLEXERKVRIIMPFACEAARVTAEVIAEHTVRALQRTVPPAVPAIVFLSGGQSEEEATVNLNAMNQLKGKKPWSLTFSYGRALQQSTLKAWGGKDENIPKAQSALLVRCKANSEATLGTYKGDATLGEGASESLHVKDYKY

SEQ ID NO: 280581 - protein, 191 aa, Glycine max
  Clone ID: PAT_MRT3847_95388C.1.pep
MSSFKSKFQDELIANASYIGTPGKGILAADESTGTIGKRLASINVENVETNRRILRELLFTAPGCLERLSGVILFEETLYQKSAAGVPFVDILKKGGVLPGIKVDKGTVELAGTNGETTTQGLDDLAQRCKKYYEAGARFAKWRAVLKIGPNEPSPLCIHGNANGLARYASIWQEKGSVLSLQPCFSKNYP

SEQ ID NO: 280582 - protein, 101 aa, Glycine max
  unsure (1)..(101): unsure at all Xaa locations
  Clone ID: PAT_MRT3847_95389C.1.pep
XSEXXEXEXXRLLPKCXXAFHXXXIDXWXXXHATCPLCRASVTACPNPNSSMEPPPRVIVNALEHQQRSNHVVVVVESSEEQEKVVSFDAHTLSDGEGYHT

SEQ ID NO: 280583 - protein, 53 aa, Glycine max
  Clone ID: PAT_MRT3847_9538C.1.pep
KKLATPKVLSSQLKVYFSINFFPLHVEEFPFFFCYGNLFPPPSCLGIQYGLIC

SEQ ID NO: 280584 - protein, 90 aa, Glycine max
  unsure (1)..(90): unsure at all Xaa locations
  Clone ID: PAT_MRT3847_95390C.1.pep
DIFFMGFSSLYTSQGKANVSKPXINQKTNQATKIGTAEAQSFGFRHNRVFGTARXTNIIPGKPVWDKSLPKXKLMXHXENXIPWQXHFXX

SEQ ID NO: 280585 - protein, 65 aa, Glycine max
  Clone ID: PAT_MRT3847_95391C.1.pep
PPLIGWIFTKNKDVWGELLNEYDYMRPLMVQTPLPLDSIKRGRWCHHNLHYWESFRLMNWMRITA

SEQ ID NO: 280586 - protein, 72 aa, Glycine max
  Clone ID: PAT_MRT3847_95392C.1.pep
MSSKMAKDPVRVLVTGAAGRIGEALVRMSGRGVVLGPEEPVILHMLDIPPAGESLNGVKMELVDAAGARRRG

SEQ ID NO: 280587 - protein, 69 aa, Glycine max
  Clone ID: PAT_MRT3847_95393C.1.pep
KISSLGQIFHHRMFPVHISINHRHNFRNIDPMSCFSAPPRKPCINRPASTQAYNQKGGMCQRPPEMLPL

SEQ ID NO: 280588 - protein, 41 aa, Glycine max
  Clone ID: PAT_MRT3847_95394C.1.pep
MYTSRKKIHKDKDAEPTEFEESVGQAWDDLETTNKELKRDL

SEQ ID NO: 280589 - protein, 36 aa, Glycine max
  Clone ID: PAT_MRT3847_95395C.1.pep
YITTSYHPFTQHVLIYFDLILIFNSINLRIVKLLPL

SEQ ID NO: 280590 - protein, 224 aa, Glycine max
  unsure (1)..(224): unsure at all Xaa locations
  Clone ID: PAT_MRT3847_95396C.1.pep
MGWGDIYKRRVRVFTMALIVYLXYKGVQQREKWTSKSRQAALWEKAHERNAKRVLNLIIEMEGLWVKLGQYMSTRADVLPAAYIRLLKQLQDSLPPXPLEEVYGTIQKDLGKXMDELFADFVNEPLATASIAQVHRATLLNGLEVGSXKXQHDGIKTIILXEDLXNAKSIVDWIAWAEPQYNFNPMIDEXWCXEASKELDFNHEAENLXTVAKNLGCRTNMMEI

SEQ ID NO: 280591 - protein, 52 aa, Glycine max
  Clone ID: PAT_MRT3847_95397C.1.pep
RAIIAQIGGLLRFRLIKNSFSYLKRLVRFLGNKVTSLFRLIYLNRGFMGGFF

SEQ ID NO: 280592 - protein, 72 aa, Glycine max
  Clone ID: PAT_MRT3847_95398C.1.pep
RWHVQRQGIPIHERARHPPRYPRVVHASPGSDNRFARGSAPFFLESGLCFKPRRHLGFKSLTWLKDISAKTE

SEQ ID NO: 280593 - protein, 52 aa, Glycine max
  Clone ID: PAT_MRT3847_95399C.1.pep
NSCHINCFFIFLISWLYMSRMDENNFYLSPLFSKQRRYLTKDFSYISKMHLV

SEQ ID NO: 280594 - protein, 75 aa, Glycine max
  unsure (1)..(75): unsure at all Xaa locations
  Clone ID: PAT_MRT3847_9539C.1.pep
EGVASPMRVVCAHWPIYXXKQKIFSQGGLKLIPWTKWESKPSTHCXKEFSLRGRGFTHRKVARILKGGKEAYNRN

SEQ ID NO: 280595 - protein, 60 aa, Glycine max
  Clone ID: PAT_MRT3847_953C.1.pep
IMNLSRIVILDDYLPQRIPYTLNHVSSNGRSGVDLMGQTILLTDLYTHHQVAIKILKALI

SEQ ID NO: 280596 - protein, 70 aa, Glycine max
  unsure (1)..(70): unsure at all Xaa locations
  Clone ID: PAT_MRT3847_95400C.1.pep
IVLSPVCLTLNQLGCFNFWTVMNFLFSPTHYNLTTLTLTLLLXANSVVTCIVDNNLPLFLLVLSPFSYTL

SEQ ID NO: 280597 - protein, 124 aa, Glycine max
  Clone ID: PAT_MRT3847_95401C.1.pep
RERERTRTWGKEMEARLKGISSGEGTPNSASGRRAEPVVLFVEENEPKEWVAQVEPGVLITFVSLPRGGNDLKRIRFRYVLDCVMICLLLCLVTLRVLVSCRVCNVVVFVGVGGFDRTVSVHVG

SEQ ID NO: 280598 - protein, 39 aa, Glycine max
  Clone ID: PAT_MRT3847_95402C.1.pep
CCWTVKTSPLDLILSESCGTAKGRGECKQNTHVSEWEKP

SEQ ID NO: 280599 - protein, 207 aa, Glycine max
  unsure (1)..(207): unsure at all Xaa locations
  Clone ID: PAT_MRT3847_95403C.1.pep
PWSLNLLQGSASPEKPVSQENDNVWVLIPELKAKLHAHQKKAFEFLWQNIAGSMDPGLMEAASKRRGGCVVSHTPGAGKTFLIIAFLVSYLKLFPGKRPLVLAPKTTLYTWYKEFIKWDIPIPVYLIHGRRTYRVFKQKSSIVIPGVPKPTDDVKHVXDCLEKIQXWHSHPSVLIMGYTSFLTLMREDSXFAHRKYMAXKVLRESPW

SEQ ID NO: 280600 - protein, 50 aa, Glycine max
  Clone ID: PAT_MRT3847_95404C.1.pep
RLREDDRRGCIKSIRVFLYSLVPQFSCPNQVINYTFINLREQFRKIDALL

SEQ ID NO: 280601 - protein, 65 aa, Glycine max
  Clone ID: PAT_MRT3847_95405C.1.pep
TEYIMICYYEFPPARLIRREPNAILISPLTKMSPHPRDSHTGKLCSCDSRLSPHMIGRSPLDYKA

SEQ ID NO: 280602 - protein, 66 aa, Glycine max
  Clone ID: PAT_MRT3847_95406C.1.pep
QHSDENVADHDNGVVAHLLLWTTVRDKSHTEDLEDQIAVSVPVTLIATDAAQMLRLRLEICTSTQY

SEQ ID NO: 280603 - protein, 76 aa, Glycine max
  Clone ID: PAT_MRT3847_95407C.1.pep
IADLWAFFCLTVNDFSNLKIYFMIWSLRLRNRLYVLHTMPTLKPTPRLELYPINHHMNTSILTNHQSNAQFNECYQ

SEQ ID NO: 280604 - protein, 66 aa, Glycine max
  unsure (1)..(66): unsure at all Xaa locations
  Clone ID: PAT_MRT3847_95408C.1.pep
XRRMRISKANKGXIPWNKGRXHTPETLQXIKXXTRARNGRIXKVQNGSSLIWACTXFQTXXESWLE

SEQ ID NO: 280605 - protein, 39 aa, Glycine max
  Clone ID: PAT_MRT3847_95409C.1.pep
VHTTTVAKITRLSKRHSIVLNLPNLLNTMSKSLMLSEVT

SEQ ID NO: 280606 - protein, 107 aa, Glycine max
  Clone ID: PAT_MRT3847_9540C.1.pep
MASDLNSGLSKKTFVFGLKVWVLMGIIVGLFIIIILVVLSICLTLRKKFRRVNGKLPLSHVISVSDEIKEIKVDQVSANNHPQNGVFKSLNDKFGDRESEKVLTKQM

SEQ ID NO: 280607 - protein, 372 aa, Glycine max
  Clone ID: PAT_MRT3847_95410C.1.pep
MEQNNKSLVSSKFLCLCLLITLISIIVAPQAEAARAFFVFGDSLVDNGNNNFLATTARADSYPYGIDSASHRASGRFSNGLNMPDLISEKIGSEPTLPYLSPQLNGERLLVGANFASAGIGILNDTGIQFINIIRITGQLQYFEQYQQRVSALIGPEQTQRLVNQALVLITLGGNDFVNNYYLVPFSARSRQFALPNYVVFLISEYRKILVNLYELGARRVLVTGTGPLGCVPAELAMHSQNGECATELQRAVNLFNPQLVQLLHELNTQIGSDVFISANAFTMHLDFVSNPQAYGFVTSKVACCGQGAYNGIGLCTPASNLCPNRDLYAFWDPFHPSERANRLIVDKFMTGSTEYMHPMNLSTIIALDSTT

SEQ ID NO: 280608 - protein, 48 aa, Glycine max
  Clone ID: PAT_MRT3847_95411C.1.pep
KDFDPLEYIIEKIVLSVIKFESKISYITDLKDHVKVLRGFTKKKRSYL

SEQ ID NO: 280609 - protein, 89 aa, Glycine max
  Clone ID: PAT_MRT3847_95412C.1.pep
RKMGIYRWSGTKRMTLEKKPVKRREERKKCPKVTAVIRPWAKLLKGFLQNGMLWDCNLISGLKLKEQGSISVKAKFESNVVTRPKVTCL

SEQ ID NO: 280610 - protein, 104 aa, Glycine max
  Clone ID: PAT_MRT3847_95413C.1.pep
SRQCVFVVECCTPPVCDWSGMCRAVEVAIAIYSPQATRVVYQSICQHVCKSLKSAASRFSFWSVDRESDVEGSDKCRKVSYNEVSCENRGRCGKHCLPRRMVVL

SEQ ID NO: 280611 - protein, 169 aa, Glycine max
  unsure (1)..(169): unsure at all Xaa locations
  Clone ID: PAT_MRT3847_95414C.1.pep
PRVRIDSGTTTAYAGDTSANINVKSHELRLHEINTLDWDDLVDANDHNTTTVPNGGTVPYFDLQDQILLNDSFSNVANNLSADIPSFGSLTQPIAGSNSVPYNFSSVNLQTMDDQANPHEQRNNTVSLKWXDSLDTLVNDRLQSQNSFGMWGKPQSCSDSPXSVDDPSS

SEQ ID NO: 280612 - protein, 479 aa, Glycine max
  Clone ID: PAT_MRT3847_95415C.1.pep
MVSSQFSAFTLAGYKPSQTQLLFPAKLVDTVNTEHIELDFSDVFGPVTLDLNNIDSTTSEPMEEVNELVYDDPPVIYTRSHSLVGPSTCVSQSLKLGKLTIHETEDSLELVEHVNGEAIKDIKESSFVEESLKDEDGNLMKIHRVSIDDFEILKVVGQGAFAKVYQVRKKGTSEIYAMKVMRKDKIMEKNHAEYMKAERDIWTKIEHPFVVQLRYSFQTKYRLYLVLDFVNGGHLFFQLYHQGLFREDLARIYTAEIVCAVSHLHSNGIMHRDLKPENILLDADGHVMLTDFGLAKQFEESTRSNSMCGTLEYMAPEIILGKGHDKAADWWSVGVLLFEMLTGKPPFCGGNRDKIQQKIVKDKIKLPAFLSSEAHSLLKGLLQKEQARRLGCGPRGVEEIKSHKWFKPINWRKLEAREIQPSFRPEVAGVHCVANFEKRWTDMPVVDSPAASPNGGNPFKDFSYVRPAASFLQRNNPAY

SEQ ID NO: 280613 - protein, 68 aa, Glycine max
  Clone ID: PAT_MRT3847_95416C.1.pep
FQQRCLSQGSCINWMTTLITLAMILFGDKAKSPFVSFSTGKKIIFSIDTFKNTYTLYPNRPIVWSNVR

SEQ ID NO: 280614 - protein, 71 aa, Glycine max
  Clone ID: PAT_MRT3847_95417C.1.pep
TIASTGRVHLDILKDGWSPAFTISKVLLAIKDIISNPDPYSPLMMSISRQYLTDRATHDEIAAEWPMRFAR

SEQ ID NO: 280615 - protein, 117 aa, Glycine max
  unsure (1)..(117): unsure at all Xaa locations
  Clone ID: PAT_MRT3847_95418C.1.pep
PYWFESTMTMLNNGLDELKSWEAFVGFDHDELLVSSSNVVLPNGTTLPXAIGKGIVFTNFPLIDLKTTVDLTQMQAQIELIGTMFRVVPHSVPMLKSINLANDGFLYRRSTAQVPGS

SEQ ID NO: 280616 - protein, 53 aa, Glycine max
  unsure (1)..(53): unsure at all Xaa locations
  Clone ID: PAT_MRT3847_95419C.1.pep
XGFXXFAYNLEXMRPCXLXCXXKLYKXXTXQXXXNSXXQLEPEXPSXRTRXCD

SEQ ID NO: 280617 - protein, 54 aa, Glycine max
  Clone ID: PAT_MRT3847_9541C.1.pep
AFQAPTEEWFSYISRFVVYPPCSMFFVSNQSWFRPHKLFTASTVFFVHACCNSL

SEQ ID NO: 280618 - protein, 60 aa, Glycine max
  Clone ID: PAT_MRT3847_95420C.1.pep
VSNRISSEESNKKVLESLKRSMHVDNETAPCRWPLADGDPRAAFAEFSADLKWDWQAGHS

SEQ ID NO: 280619 - protein, 118 aa, Glycine max
  unsure (1)..(118): unsure at all Xaa locations
  Clone ID: PAT_MRT3847_95421C.1.pep
VSCNNLEMQEAYLVDGGNVLPELYLHNPKEARPLRRKALSRIEWLQKADVPTIAQIEXEFHSMPKMMNAPESNDNIELLVSIDLVGLHRAGKAFPNKIVFDDKLVLANTQRILLMENF

SEQ ID NO: 280620 - protein, 33 aa, Glycine max
  Clone ID: PAT_MRT3847_95422C.1.pep
PLNIMLTASGTTKLGGGAMSMRFSYFQHFTNNL

SEQ ID NO: 280621 - protein, 137 aa, Glycine max
  Clone ID: PAT_MRT3847_95423C.1.pep
GGLGPSDRQLLLFYLEQCEANLTTLTNAVDAFFTAVATNQPPKIFVAHSKFVILSAHKLVFIGDTLSRQAKAADVRSQVTHYSNLLCDLLRGIVATTKAAALQYPSPSAAQDMVERVKELGHSTQQFRRVLGQLAAA

SEQ ID NO: 280622 - protein, 45 aa, Glycine max
  Clone ID: PAT_MRT3847_95424C.1.pep
KRKFVADGVFFAELKEFLTLNLAYHGYSGVEVRVRPMGTEIIIRA

SEQ ID NO: 280623 - protein, 60 aa, Glycine max
  Clone ID: PAT_MRT3847_95425C.1.pep
NSNMYRYMGYLIKDSVIKHQSKSLPFSPNNVSNCSHHTTTTSTSIQTHARMIAVLSNFLR

SEQ ID NO: 280624 - protein, 164 aa, Glycine max
  unsure (1)..(164): unsure at all Xaa locations
  Clone ID: PAT_MRT3847_95426C.1.pep
MPADTVGKTITCKAAVAWEAGKDLSIEDIEVAPPKAHEVRIEIYYTGVCHTDAYTLSGKDPEGAFPIVLGHEGAGIVESVGEGVTNVKPGDHVVALYTPECRECKFCKSGKTNLCGKIRATQGKGVMPDGASRFSARGXDLLHFMGTSTFSQYTGVADISVVAI

SEQ ID NO: 280625 - protein, 136 aa, Glycine max
  Clone ID: PAT_MRT3847_95427C.1.pep
MPQVDLETLVSACAGGCSDQKIAYEPHVDDGDHHPDSPPASFWLSGDAEYDWWDRNAVYQRNESTKGNSIVSSTNLNANSNNNSQRFSKNLKSKAAIIGLPKPQKASFADASSRRNHRPPGNARLFPKRSASVGGK

SEQ ID NO: 280626 - protein, 53 aa, Glycine max
  Clone ID: PAT_MRT3847_95428C.1.pep
MPCLYITTNLNLDGVDTNPVFSEATTAVSTIIGKPEKVLINLNLPPFLCHVNL

SEQ ID NO: 280627 - protein, 315 aa, Glycine max
  unsure (1)..(315): unsure at all Xaa locations
  Clone ID: PAT_MRT3847_95429C.1.pep
MALFSSQGAMWHCLIPSKASRTVKSRAGSENYNNLVLKKDERLGAGECVGEVGSGTTIAAIVTSVGGPPAAVGIAHASGPGAVSIAGRVFRPARKTWRPTSHVVEYGVVLDSDGNVIDEVLAVPMLAPRSYTREDVVELQCHGSEVCLRRVLRTCLEAGATLAQPGEFTLRAFLNGRLDLSQAENVARLIAAKSVAAADAALEGIQGGFSSLVRSLRSQCIELLTEIEARLDFDDEMPPLDLNLIMDKIHNMSREVENALETANYDKLLQSGLQIAIVGRPNVGKSSLLNAWSXHXSERGIVTEIAGTTRDVIEA

SEQ ID NO: 280628 - protein, 116 aa, Glycine max
  unsure (1)..(116): unsure at all Xaa locations
  Clone ID: PAT_MRT3847_9542C.1.pep
MVSSFNLGGLISKADVLSDGLKYEKYLVRYRSQDEKRKATCTDMADKYYDLVTRFHELGWGVSFPFAPRCIGXLLLETIRRHEHSLAXQLGLKPWLNVWVAGCXIGGLLREIVGFW

SEQ ID NO: 280629 - protein, 96 aa, Glycine max
  Clone ID: PAT_MRT3847_95430C.1.pep
IPRSSYTVGTSFCKEVLVSSSDEVPLLRIFRSLIKRKLFSVTGRSLPCTLDLDGRFNDPFMTLEYFWEKMHIMTKGTVEGSECLKYFTDCESRRIM

SEQ ID NO: 280630 - protein, 179 aa, Glycine max
  Clone ID: PAT_MRT3847_95431C.1.pep
MLPASGLEPSPLISEKALAQPQDAPSSSAAASPAVANAPPRALGEQRRESTVSSSTSHGVSGFESAEQSPQVCNNSTLHDAPLIVEPAGSASPLSAPLTAPARSSAAAALASPRLPPLEALELSARASLDAAAAAAASSSPRVSPRTSPLASPLSHAATLPASVSSASVASVGGMATPP

SEQ ID NO: 280631 - protein, 84 aa, Glycine max
  unsure (1)..(84): unsure at all Xaa locations
  Clone ID: PAT_MRT3847_95432C.1.pep
ICDCKIHHSVDGLRXISEGDIIEDSLLMGTDYYETEADKELLADKGGIRISIGKNSCIRRAIIDDNARIGDNVKILIAVIVQEA

SEQ ID NO: 280632 - protein, 61 aa, Glycine max
  Clone ID: PAT_MRT3847_95433C.1.pep
PNPKPPHSYNSTNPSAMIPEKELFRYIIDFILTIFTSSAPRVPPRQRSFKFKATTTSSRIP

SEQ ID NO: 280633 - protein, 81 aa, Glycine max
  Clone ID: PAT_MRT3847_95434C.1.pep
TLQGCRKNMKETAPGCYNCGKPVHWSRDCPFSAPNSNPNPNPNPNPNPATTLNPNTRNPSSSSFKPKIPGEKPKKLPRTKP

SEQ ID NO: 280634 - protein, 47 aa, Glycine max
  Clone ID: PAT_MRT3847_95435C.1.pep
KKFQRKIGLRWVPFPRKGFPTWGEFPIKFNPVLWIIIGTLILFLTPP

SEQ ID NO: 280635 - protein, 81 aa, Glycine max
  Clone ID: PAT_MRT3847_95436C.1.pep
VFINMESLEERVFMFMDEQYYFSNSNESELHMHHHPSVSVENISWENNTDFDDSPERTLYWKSQIALLQVYTYFKSCLIEI

SEQ ID NO: 280636 - protein, 49 aa, Glycine max
  Clone ID: PAT_MRT3847_95437C.1.pep
NSGVQNIVCQRVLGMVLTMGENIFPPRVMTYDYYYPATELGLFTSNISS

SEQ ID NO: 280637 - protein, 41 aa, Glycine max
  Clone ID: PAT_MRT3847_95438C.1.pep
ARVASGCHRIWMWNGIWSGHGMLCVVNRKASMDCEKVWSLT

SEQ ID NO: 280638 - protein, 69 aa, Glycine max
  Clone ID: PAT_MRT3847_95439C.1.pep
ILFLQALRVRDISTNLGYWKPIISIEFSSTLALLLIHQDLDTAFVDSRDNVVSEARRGRNNHKPQPHRT

SEQ ID NO: 280639 - protein, 103 aa, Glycine max
  unsure (1)..(103): unsure at all Xaa locations
  Clone ID: PAT_MRT3847_9543C.1.pep
FLVFSQQILDTFVKIEFWYIDQGVLAPDVDGPSSFSXQRQEEKWWLPVPQVPPCGLNENSRKXLQHKRDCTNQILKTTMAITNITLAXMDIPDSYLGISSKGI

SEQ ID NO: 280640 - protein, 58 aa, Glycine max
  Clone ID: PAT_MRT3847_95440C.1.pep
KERKFRVHKKLKKIKRKKNKKRKKEKIIKKVKKIKKKKDIKKRQVVVIRRKFGELAEG

SEQ ID NO: 280641 - protein, 325 aa, Glycine max
  Clone ID: PAT_MRT3847_95441C.1.pep
MSNLPQSLSMGAAFGGGGAPTPSSSGGAGAQGSGAGKDRKMASAEQLVLELSNPELRENALLELSKKRELFQDLAPLLWNSFGTIAALLQEIVSIYPVLSPPNLTPAQSNRVCNALALLQCVASHPDTRMLFLNAHIPLYLYPFLNTTSKSRPFEYLRLTSLGVIGALVKVDDTEVISFLLSTEIIPLCLRTMEMGSELSKTVATFIVQKILLDDVGLDYICTTAERFFAVGRVLGNMVAALAEQPSSRLLKHIIRCYLRLSDNPRACDALRSCLPDMLRDATFSTCLREDPTTRRWLQQLLHNVGVNRVPALQAGGGFDHMIVT

SEQ ID NO: 280642 - protein, 103 aa, Glycine max
  Clone ID: PAT_MRT3847_95442C.1.pep
MSNLPQSLSMGAAFGGGGAPPQPSSVGGGAQGSGAGKDRKMASAEQLVLELSNPELRENALLELSKKRELFQDLAPLLWNSFGTIAALLQEIVSIYPVLSPPN

SEQ ID NO: 280643 - protein, 47 aa, Glycine max
  Clone ID: PAT_MRT3847_95443C.1.pep
LDRSILRTYAHDDVSAGSWFIGLDVKHVDEAKFCCSSWSTGAICAGV

SEQ ID NO: 280644 - protein, 46 aa, Glycine max
  Clone ID: PAT_MRT3847_95444C.1.pep
LFIRAVYYFGLTLFIIKGDKKVESKNKVCALNDCMYSTLFASKFSG

SEQ ID NO: 280645 - protein, 70 aa, Glycine max
  Clone ID: PAT_MRT3847_95445C.1.pep
RMWCLMERSHILLLILLMWCLIGFLDLFGDIKYIGVCCYYKGCLLSLYFSFCWKIYLFLFTFSLTKLIIK

SEQ ID NO: 280646 - protein, 49 aa, Glycine max
  Clone ID: PAT_MRT3847_95446C.1.pep
LFRDRRAKNKHLCFINYNFYLLYFQSKKKKQILFCKKDRAPVLAFTILI

SEQ ID NO: 280647 - protein, 220 aa, Glycine max
  Clone ID: PAT_MRT3847_95447C.1.pep
AARRRQKGATLYHPQTNGQAEISNRELKRILEKTVASSRKDWALKLNDTLWAYRTTFKTPIGLSPFQPVYGKSCHLPVELEHKAYWALRLLNFDNNACGEKRKLQLQELEEMRLNAYESSRIYKEKTKAYHDKKLQRREFQPGQRVLLFNSRLRLFPGKLKSKWSRPFIIKEVRPHRAVELVDPREGSFEKKWIVNGQRLKPYNGGQLERLTTIIYLNDP

SEQ ID NO: 280648 - protein, 72 aa, Glycine max
  Clone ID: PAT_MRT3847_95448C.1.pep
AAISPKGRKQSTLKRGVCNNTELTLTEQDTGTSTSNIFSSTIHNNLLKIELTFIYVHFNHQSYMIHFLCTKN

SEQ ID NO: 280649 - protein, 68 aa, Glycine max
  Clone ID: PAT_MRT3847_95449C.1.pep
TFNIQPLILYKLINQSKLTRNICIIDLNLSIYIFHFAIDFLRNYLMRNFKFSHYNFFLNHPYEGYHLH

SEQ ID NO: 280650 - protein, 52 aa, Glycine max
  Clone ID: PAT_MRT3847_9544C.1.pep
PQALWGTLGSVIFGSSGVFAASHEVCVEQIVAFCLEFVLVGLLCSGLDDKRH

SEQ ID NO: 280651 - protein, 82 aa, Glycine max
  Clone ID: PAT_MRT3847_95450C.1.pep
LVLCSWYGIAEVKSQSQKVSGLLVFGDILVEVSNNNSLNTIARADYFTYAIYFGKGSTGLFSNGKSLMDFVGDSLGITSPTP

SEQ ID NO: 280652 - protein, 44 aa, Glycine max
  Clone ID: PAT_MRT3847_95451C.1.pep
KQCTLSSEQPLYSWSVVLHPIASVAVPAPHASGVSLSLCPAQSL

SEQ ID NO: 280653 - protein, 192 aa, Glycine max
  Clone ID: PAT_MRT3847_95452C.1.pep
MYMERIRVKEEEAVTCGGGSSSSSSSSSSFSPQPMEGLHEVGPPPFLSKIFDMVEDSSTDSIVSWSMARNSFVVWDSHKFSADILPRYFKHGNFSSFIRQLNAYGFRKVDPDRWEFANEGFLAGQRHLLKTIKRRRNVSQSLQQKGGSGACVEVGEFGLEGELERLKRDRNILMAEIVRLRHQQLNSREQLN

SEQ ID NO: 280654 - protein, 65 aa, Glycine max
  unsure (1)..(65): unsure at all Xaa locations
  Clone ID: PAT_MRT3847_95453C.1.pep
MGQEKVHINIVVIGHVCFRMPTTTGHSSYKLGGLXQLCIERTIERACGMYKRSYKHAWGLHMLKC

SEQ ID NO: 280655 - protein, 174 aa, Glycine max
  Clone ID: PAT_MRT3847_95454C.1.pep
MDNKKSKWSWSSAIIGAASAVAASALISAKPKDPTFHLISINFTSLKLNFPLLDAEVLLTVHVTNPNIAPIHYSSTSMSIFYQGSLLGSAQVQAGSQPPRSCQLLRLPARLHALELAHHATRFLHDVARREMFLDAAVDIAGTARVMWWDHNFKVHVDSHVTVDPVFLDVIDQE

SEQ ID NO: 280656 - protein, 33 aa, Glycine max
  Clone ID: PAT_MRT3847_95455C.1.pep
CALIQCQSIELLSLSQPLLESQLDTISREPRYR

SEQ ID NO: 280657 - protein, 146 aa, Glycine max
  unsure (1)..(146): unsure at all Xaa locations
  Clone ID: PAT_MRT3847_95456C.1.pep
VCMFCAKYYKKLNIDXGTYAMLGAASFLGGXKWMTLSLCVIMVELSDNLGYSPLIMLELLISKAEGDAFNESVYDEQAQLKGIALLQSMPKYDMQNMTAHESCESGMVGSFPHVVDVSVLFNILRSNRHNDFTVIDHTRTGYTLAI

SEQ ID NO: 280658 - protein, 79 aa, Glycine max
  Clone ID: PAT_MRT3847_95457C.1.pep
SARTLWKLKTVSSCYHKEGRPVLVCPQDTRWTVSFGSKIHMGPTVLQGTSERVTVVFLRVRKSDNLRMCTICSVVVPIV

SEQ ID NO: 280659 - protein, 99 aa, Glycine max
  Clone ID: PAT_MRT3847_95458C.1.pep
FTIHPTSFFFPFTPSSFPSPHQPTKWTPHSPSTADPPPTSSSAPSPSAPPPPPPRRNSTRPNFFGPRIPPNRNPNALRPRQNPTSATSIAPWIPEFSSC

SEQ ID NO: 280660 - protein, 178 aa, Glycine max
  unsure (1)..(178): unsure at all Xaa locations
  Clone ID: PAT_MRT3847_95459C.1.pep
MGSVSLKIGDGTARFQRATLCSSAVNILMIFSVITTNLFALYAFTASPNQPQHSLLHHNNAHKNISLISEQVSLILREIDLSQKKLAQMEKELLGYESIDLSRPNIASELKLFLQRHQLPLGKDSRTGITEMVPSVGHTCEKNSDXLSQFMNYKVFGACPDDWSVAQKLILKXCEPLP

SEQ ID NO: 280661 - protein, 106 aa, Glycine max
  Clone ID: PAT_MRT3847_9545C.1.pep
MAVNNNKLVLLTFTICHLIVTVVPELLDLGLQGRLSVDTWELEAASVDFGRLSRGEPSEVVHPATAEDVARVVKAAFKSPFAVSARGHGHSINGQALIKEKKRGGD

SEQ ID NO: 280662 - protein, 109 aa, Glycine max
  Clone ID: PAT_MRT3847_95460C.1.pep
FPHYPARLTVLSPRVALTNFCDVTTFIPITHNTILLLTIPRIGNLRGWRIVLAASVITRGGLSGAALLDPLVTLSCTQWLSLSFLTYFAYGLPYYSGVTTSYTPFPLGL

SEQ ID NO: 280663 - protein, 65 aa, Glycine max
  Clone ID: PAT_MRT3847_95461C.1.pep
GRPFIPQNSPQVVYPLQKDWGFLDPCWAKEQNGPDALGWDPPARFLEKKKMKDKRFHKKKERKNK

SEQ ID NO: 280664 - protein, 60 aa, Glycine max
  Clone ID: PAT_MRT3847_95462C.1.pep
WHSYFQQRPSIFPSVGVRECARFVCKQDSTKPSQYGSVRSPLVFLNAKLFAPMHYSDVYK

SEQ ID NO: 280665 - protein, 238 aa, Glycine max
  Clone ID: PAT_MRT3847_95463C.1.pep
GSSCFTIFDSPLDLFLKLWAHYYAKGCDTAAEYEAAMKKLAAKLMCLMLASLGIPKEDIKWAGPKGEFNGACAALHWNSYPSCPDPDRAMGLAAHTDSTLLTILHQNNVNGLQVLKEGEGWVAVPPLPGGLVINVGDLLHILSNGLYPSVLHRVRVNRTRQRFSVAYLYGPPTNVQISPQVKLVGPTRPVLYRSVTWNEYLGTKAKLFNKALSAVRLSSSINGLFDVNEDKSNDFQVG

SEQ ID NO: 280666 - protein, 76 aa, Glycine max
  unsure (1)..(76): unsure at all Xaa locations
  Clone ID: PAT_MRT3847_95464C.1.pep
HXXHIXVXXQCTPXXLIKNFCCVFLHXLRNXXQXENLXXIEKDYXTYSSXTSTMGXPCPSHXHXXNRTXPXLSNHX

SEQ ID NO: 280667 - protein, 229 aa, Glycine max
  Clone ID: PAT_MRT3847_95465C.1.pep
LEVKKKAMPGPGPHLMYAMGSGLCLTSISNGRFSPHHTLFYTINAFFGPDVGSFTEWLGSLFGGSAHAFGSALEDLTHHPLLYILLLGLPLSFLYSRISSYLLHTQLLDSLSRVPLTRMQCFLLISAGSFTHFFLDHLFEENGKTTTYTWILSTGWWQSRAPVNPDAVVVVVFLCACLIGGFFYLNRANASNSIKKKSYQSMLLVMSIACLYCFWCAIQIYWISPRRPA

SEQ ID NO: 280668 - protein, 79 aa, Glycine max
  unsure (1)..(79): unsure at all Xaa locations
  Clone ID: PAT_MRT3847_95466C.1.pep
MCRFDRAITELSPDCHLFQVEYALESRRKGNVIVCVRGTDNVFLXFRRKPPPXLQDFRPVRKIAYMDNHIALVCAALKA

SEQ ID NO: 280669 - protein, 299 aa, Glycine max
  Clone ID: PAT_MRT3847_95467C.1.pep
MESAANLPDILPSNIEAMAHSFILTLIIHDLNDVFASLPMSDVDPFLSVSDDYHVYAKIHVDVREYGTAADNQLACSMLSELQNKIRECQSIIRDALVHNLANVTELDADELAMLLSEKFKPDEEFVFGPQSMLDQNQIIFHSQESLSFDGDFPSNSAGGEDDTISEASVSDLSRFIPKMPISPSAPQVISIGQLMESALEVAGQVAGTAISTSPLPYNAMASQCESLGTCARKKLSNWLAFENHYSQAPDKSFLAIADIRNSALEKVANGGGHAQLPRDPMKLPPASPFDNFLKAAGC

SEQ ID NO: 280670 - protein, 44 aa, Glycine max
  Clone ID: PAT_MRT3847_95468C.1.pep
SKFEAFPRLKSMFTLYKLPLNTMFPLLNLHPAPNDYEFADALTL

SEQ ID NO: 280671 - protein, 73 aa, Glycine max
  unsure (1)..(73): unsure at all Xaa locations
  Clone ID: PAT_MRT3847_95469C.1.pep
MTDEXVVLDFWPSPFGMRVXTAXAEKGIEYEYXEEDLRNKSPLLLQMNPVDKKIPVLIXNGKPISEXLIAVQY

SEQ ID NO: 280672 - protein, 42 aa, Glycine max
  Clone ID: PAT_MRT3847_9546C.1.pep
QWLMFYGGAWRPAQKKSTWSVTSTGDYIPLHMIITHSTWCYK

SEQ ID NO: 280673 - protein, 86 aa, Glycine max
  Clone ID: PAT_MRT3847_95470C.1.pep
KQRLQGRKDTERSRRSRLRWCWRVQAQEMKRRGYTDCAEDGLDAMNQSPEGSLAKQLSGQFVTSEIVSSQGDSDDTPQVTSIIKQI

SEQ ID NO: 280674 - protein, 83 aa, Glycine max
  Clone ID: PAT_MRT3847_95471C.1.pep
KMFETSYFEISAYSNFRIICSYQYSYPCVISLSSTLQPTFLPSPYMHVSKVYLLVNCIKSFKIIRKWYIKGIVIYISHIYFEL

SEQ ID NO: 280675 - protein, 73 aa, Glycine max
  Clone ID: PAT_MRT3847_95472C.1.pep
YPTGAHPEWLMGIALYRWIMGRGLDRYIKRGRYGGHSHSDSSLASLLAFDAMFVFFSFLAINLRFPLRVLNSG

SEQ ID NO: 280676 - protein, 37 aa, Glycine max
  Clone ID: PAT_MRT3847_95473C.1.pep
FYILLLLLHYVTFIMYLRQNENKESTCIHLLIQTHVA

SEQ ID NO: 280677 - protein, 195 aa, Glycine max
  unsure (1)..(195): unsure at all Xaa locations
  Clone ID: PAT_MRT3847_95474C.1.pep
MKMARGKNLFLQILWCFSLIGLSSQAQNYTFVVREAKYTRLCSTKSILTVNGEFPGPTIRANRGDTIFIDVYNKGNFNITLHWHGVKQPRNPWTDGPSYITQCPIQPGRKFTQRLIFTFEEGTIWWHAHSEWLRATVYGAIHIYPNKNNPYPFPQPDAEIPIIFGEWWTSDVNEVFRQSMETGGAPXVSDALTIN

SEQ ID NO: 280678 - protein, 40 aa, Glycine max
  Clone ID: PAT_MRT3847_95475C.1.pep
YALPDKHSCSYNVELEDQAVFTCQTNMLSIVTHTRMKKTN

SEQ ID NO: 280679 - protein, 198 aa, Glycine max
  Clone ID: PAT_MRT3847_95476C.1.pep
PSFLLRGEGITKTIYTMAFAFTFTKTLILFVSLSSLLLQTHAARGPRTVQARLYSLCKPTTNVGLCYRTILPEVLGLPRFNYYKALEVEMLVTQKQVEKTSKLISVLLARPGNSKDLGDSLQICKEQYGNIMDSMAEAKSQVAQRNVIEARFKFSSVVSYYESCNDSFPKGTSPIVEEAQGVYALARKLLGHHESHSK

SEQ ID NO: 280680 - protein, 91 aa, Glycine max
  Clone ID: PAT_MRT3847_95477C.1.pep
HTTDSTQHSFKKTLLDIVNSIQNAHNADCLEGPITLNQHQRQQEGLHNMRAWSHIHLRSRALLKKPCHRDYKSINLSRLGSDSAQVKSLQN

SEQ ID NO: 280681 - protein, 94 aa, Glycine max
  Clone ID: PAT_MRT3847_95478C.1.pep
FQFHFLFLLILHKFHLTINNFLDYFSICTCHPCAVAILIINNNVYWLNYFIISIIFTFLQTKREFLLENNNRFINSFSHLGRVEYVRNRFMNLK

SEQ ID NO: 280682 - protein, 52 aa, Glycine max
  Clone ID: PAT_MRT3847_95479C.1.pep
SHEETSPATSPHVIAPVPMGLTLMATTMHIIATTHATLKLVIINQRKKQTTK

SEQ ID NO: 280683 - protein, 63 aa, Glycine max
  unsure (1)..(63): unsure at all Xaa locations
  Clone ID: PAT_MRT3847_9547C.1.pep
NFIPGFNQKLAWGKRLLTFTGILILVSDGGIGQTFLLYEHIKLNTFDFDLCWRXAKQLLKSHI

SEQ ID NO: 280684 - protein, 94 aa, Glycine max
  Clone ID: PAT_MRT3847_95480C.1.pep
FISNQSPIQHISLTNKLKFASTTTLFVTNFILLDKVLQLFCTYIISILFSSSAIVVKGNPLRTKSLPTTFIKPIWKNCLTPIFTLLILFPTFFH

SEQ ID NO: 280685 - protein, 83 aa, Glycine max
  Clone ID: PAT_MRT3847_95481C.1.pep
MAVNGASVMRRCSVAARLFMTADRVAPAVPQVCGRGDKKTKKGKRFKGSYGNARPKKEKMIERIKDKVEVPRSTPWPLPFKLI

SEQ ID NO: 280686 - protein, 91 aa, Glycine max
  Clone ID: PAT_MRT3847_95482C.1.pep
YMDIFASLFLENVELGFPEGFRFHFLWVQDRGNKKTNNSDSYMNIFASLFLENVELEFSEEFGCHFIWLQDRSNVWKDECDVIYHEQCLEL

SEQ ID NO: 280687 - protein, 84 aa, Glycine max
  Clone ID: PAT_MRT3847_95483C.1.pep
PYIFGIDRFQSKKHVVHYCKFRCAHCIGTFFCMKSVDPLLPSFFCVLSLPSTSSILYSTRVHDCLSMSLSTLPPRFASVTIDTI

SEQ ID NO: 280688 - protein, 34 aa, Glycine max
  Clone ID: PAT_MRT3847_95484C.1.pep
LKANPGYNCSGNFQFLHTTPFITSRNIKFACYYT

SEQ ID NO: 280689 - protein, 70 aa, Glycine max
  Clone ID: PAT_MRT3847_95485C.1.pep
IIPIQALVRVTEPPNPISDPPTFGTPSFHSSFSLKSKPLYSIWGFFKPPPRSITNLPFTHARIKKRAFDD

SEQ ID NO: 280690 - protein, 82 aa, Glycine max
  Clone ID: PAT_MRT3847_95486C.1.pep
KKYGDLGEKKRNAHMEKIPKKKNGGEKVIKLGGAPWKNLKLSWKAWNKSWMDFKKKKIGANPFFAKSLNWGKPPLPFKKKGN

SEQ ID NO: 280691 - protein, 231 aa, Glycine max
  Clone ID: PAT_MRT3847_95487C.1.pep
MENGNLQNLLYDLPLGVQSTDDWSTDTWEEADNNGIQNAGSEGLLTSWRFRHRIALGTARALAFLHHGCSPPIIHRAVKASSVYLDYDLEPRLSDFGLAKIFGSGLDDQIARGSPGYVPPEFTQPELDTPTPKSDVYCFGVVLFELVTGKMPVGDDYPDDKEATLVSWVRGLVRKNQASRAIDPKIHDTGPDEQMEEALKIGYLCTADLPFKRPSMQQIVGLLKDIEPTAS

SEQ ID NO: 280692 - protein, 27 aa, Glycine max
  Clone ID: PAT_MRT3847_95488C.1.pep
VKPWDMMHWIKKGLTPVPWFSIPKEFC

SEQ ID NO: 280693 - protein, 97 aa, Glycine max
  unsure (1)..(97): unsure at all Xaa locations
  Clone ID: PAT_MRT3847_95489C.1.pep
IYTLYILTHFDSGFLNRHVGLTYNYGNGDTYGDGYLQVLATTQTSWQASKKSFQGTADAKKQFXWLFYDPRSYDIXDDLILSXDHLSRMDYMDFVQN

SEQ ID NO: 280694 - protein, 311 aa, Glycine max
  unsure (1)..(311): unsure at all Xaa locations
  Clone ID: PAT_MRT3847_9548C.1.pep
QLWLFWELLLGEPILIIAPTPPQCSEVVASLXPLLCSVDFHPYFTIHDPQFAHLNSIREGETFPPMVLGVTILFFLKALHKIPYIVSVGSPPPSSNRVSLSTRSSTGKVSSRPEGLGLQQLSLQKFSPSSLLNAIKLWRDGPLCLMTEHKEAIWSTYSATTKPDTSILNRLIDAGVSPRVEESMSVVNNEILRRHFLELMTNFLAPFSPYFRTSTPSEGSSPYVDPPSLPPFNADEFLSSLSARGPGKFILKRMKSNWLDLYRRFLNGPNFMPWFQRRRAVAEQEQDRLWRLARMKTDIQQLISRLPELEI

SEQ ID NO: 280695 - protein, 76 aa, Glycine max
  unsure (1)..(76): unsure at all Xaa locations
  Clone ID: PAT_MRT3847_95490C.1.pep
LTSILSNVIFIXCFSRLHFFLVFFLVVDLWWACYKSFIHFFMLILIYSSLSYNTFTFVFIYILYIQERTQNLTKRW

SEQ ID NO: 280696 - protein, 96 aa, Glycine max
  unsure (1)..(96): unsure at all Xaa locations
  Clone ID: PAT_MRT3847_95491C.1.pep
VAAGTVMSVNMSYRLGWIXVSPVNSVGDILXLYGLPQAPLEPVNVYMFKSVTAVXKKVAYGFFRLILGKGRLGNCVFPGDNARWALPDTLRAFGKS

SEQ ID NO: 280697 - protein, 60 aa, Glycine max
  Clone ID: PAT_MRT3847_95492C.1.pep
QIRHLIYQLVGHCPATENTSYTCYTIYRNYEISTYKKHIHRSSLNVETLLHPHDRPSTWE

SEQ ID NO: 280698 - protein, 50 aa, Glycine max
  Clone ID: PAT_MRT3847_95493C.1.pep
VIKPWLCSHSIFAEMVIRKGLFLLFSRVILLVSSNPQAHRLIPLTLPDYR

SEQ ID NO: 280699 - protein, 37 aa, Glycine max
  unsure (1)..(37): unsure at all Xaa locations
  Clone ID: PAT_MRT3847_95494C.1.pep
ILIPDDTFXFMIYYYNFXXXTVFPFCLXILLGXFMGN

SEQ ID NO: 280700 - protein, 55 aa, Glycine max
  Clone ID: PAT_MRT3847_95495C.1.pep
MQGEPRKHLTTKAAKKSAPTTDLMKKPHDFHPSTMALMKIRKYQKNTELLIQKLP

SEQ ID NO: 280701 - protein, 177 aa, Glycine max
  Clone ID: PAT_MRT3847_95496C.1.pep
MGRSRRKYKQSRTKVRVGLPKKNPRLFKPSFSNPRLFKPSFSVPPKLLRSLAQEPQWDDQGTVNTNYSSFGVLSDPNSLTELSSDPQTIDSGSDLEEDDLKSALGKKRRDGRSAPPQPLTAMQRIHISRLVGKYGNDYQSMLVDIKLNPMQHSIGTLQKLCMRYHIYQNKNPLLKAK

SEQ ID NO: 280702 - protein, 61 aa, Glycine max
  Clone ID: PAT_MRT3847_95497C.1.pep
RTLVRNYHKLNKHHTKRKFYETPQHFFTQSHSQHQHSTPLVPMTYSEQLKKYLKVFLQDYI

SEQ ID NO: 280703 - protein, 50 aa, Glycine max
  unsure (1)..(50): unsure at all Xaa locations
  Clone ID: PAT_MRT3847_95498C.1.pep
MDPDASAKASVEHYYSTFDSNLNGLADXYHEGFMLTFVGLKIQCACSISQ

SEQ ID NO: 280704 - protein, 242 aa, Glycine max
  unsure (1)..(242): unsure at all Xaa locations
  Clone ID: PAT_MRT3847_95499C.1.pep
LTARADPLHPPRTHLHTSLRSSTSLSSPRTLAPTSSSAWCCSPWRCLTLLAVALLAAIGXTSDYVLYRPHRPEFSVTNLRIAKMNLTTSADSPSHLTTLFNLTLIAKNPNNHLVFFYDPFAMTVFSNSVPVGNGPVTARTSDKNNQTXSLRAVLSGSQDLDTDSLTSLRSGLKMKRGFPVEIQMDTKVKMKMDWLKSKKVGIRVTCDGIRGTVPSGKSPAVASVVDSECKVDLRIKIWKFSF

SEQ ID NO: 280705 - protein, 59 aa, Glycine max
  Clone ID: PAT_MRT3847_9549C.1.pep
LVRRIISAHICEEPNADLTGTHMLLRLLPYCIDYGLAYTLTKTGTINHVRLMDVGYYAY

SEQ ID NO: 280706 - protein, 66 aa, Glycine max
  Clone ID: PAT_MRT3847_954C.1.pep
ADGCPYLYAMVHDNSAPTTPSDIVIGVEETTINNRRAYGVRPGIFCSWVLGTIPQTILQKTVWSKM

SEQ ID NO: 280707 - protein, 134 aa, Glycine max
  unsure (1)..(134): unsure at all Xaa locations
  Clone ID: PAT_MRT3847_95500C.1.pep
IAAYEAPVSQPQLSLERGLPAMSGTLHSKXCFPYPSLAXDMVQCAHARHFVVLKKNGTLLTEXDRALTPGGYSASPSPTGRPQPSSRENKTDHGPPYARADPTTXWTLLAQQDETFIWLHTADIARYASRRCVL

SEQ ID NO: 280708 - protein, 212 aa, Glycine max
  unsure (1)..(212): unsure at all Xaa locations
  Clone ID: PAT_MRT3847_95501C.1.pep
MATCGSLHHIFDTLLPEKSTLLESLSWNQIKPLKSTDQTHSFTEXFGELHFKESPSSSPSTPHNSDSFSSLSSESLHLCTEGLGFESSDDVEDFKDGMSESCEVYKEKEGVKRCVSSRVSEYPPPISCIGRSGKPWVCFRSYRSEGRFVLEEIRIPTHEFLHACREDGRLKLHFVHHEDEPIEEEEEEDDDIGVETMDEEEEEENMGEKNDD

SEQ ID NO: 280709 - protein, 159 aa, Glycine max
  Clone ID: PAT_MRT3847_95502C.1.pep
NSARARAAVNYIRGLMRMQGMKKIPGYSLIEVGNKVYTFFASDDSHPSWADIYQLLENLRLEVEAEGYIPDTSCVLRDVNEPMKVKLLWGHSERLAIAFGLLSTPCGSLIKITKNLRVCVDCHNVTKYISKIVQREIIVRDANRFHHFVNGICSCNDFW

SEQ ID NO: 280710 - protein, 47 aa, Glycine max
  Clone ID: PAT_MRT3847_95503C.1.pep
AACLYIDCRRDNEPRTVNEICSVANGASQKEIGRAQEYIVTQLDWEN

SEQ ID NO: 280711 - protein, 55 aa, Glycine max
  Clone ID: PAT_MRT3847_95504C.1.pep
LLLICCRRSGQFPKNIFLASKITFPAPAVNRLSFQNVDSLNKAVLHLYLSIHCLS

SEQ ID NO: 280712 - protein, 54 aa, Glycine max
  Clone ID: PAT_MRT3847_95505C.1.pep
IRLEVDTEGYSDGSDGNTAGANQTKRKRCREGTLTTGMTLIHCCILTNKRVVLD

SEQ ID NO: 280713 - protein, 112 aa, Glycine max
  unsure (1)..(112): unsure at all Xaa locations
  Clone ID: PAT_MRT3847_95506C.1.pep
RXGXAXNLWRXGXSQNREGSXGRGCESXHQEXSNEKRYXAGATKSAYXRAVFSRWVKRRLQQVFVFYYERYGFVLPRKERWNGSISKLHSDVRDRTVLQRLSSWYTRIKIRK

SEQ ID NO: 280714 - protein, 86 aa, Glycine max
  unsure (1)..(86): unsure at all Xaa locations
  Clone ID: PAT_MRT3847_95507C.1.pep
VLCPVCFFRFLSLVXFLPLFLSXXLWLLVVCRVAFLLVXXCLXGLLXXSVFLLXXVSXLSLFXWLGPFVLXXMLACCXFXGSLNSA

SEQ ID NO: 280715 - protein, 249 aa, Glycine max
  Clone ID: PAT_MRT3847_95508C.1.pep
MTEDSIVRVSSSNETSAANEASQTRQRKKRKWDQPAESLMPVGMTVPGALPLSNAVTLGGVAFPAMAPVISGTLLTNPLAASAQLPQHAAAAAVAAQKLNQHKIQDELIIAREIVINDAESSVRYKLTKRQTQEEIQRCTGAIVITRGKYRLPNAPHDGEKPLYLHISAGAHIKETAERILAVDRAAAMIEEMLKQVQNSQSISSVTPSALVNGVKMLSTCVFLGFDADPSLNIVARIRGPNVSPSLPK

SEQ ID NO: 280716 - protein, 135 aa, Glycine max
  Clone ID: PAT_MRT3847_95509C.1.pep
MTEDSSVRVSSSDKTSAANDASQTRQRKKRKWDQPAESLMPVGMAVPGALPLSNAVSLGGVAFPAMAPMISGALLRNPLAASSQLPQHTVAAAVAAQKLNQHKIQDELIIAREIAINDAESSGRYKVTKRQTQEE

SEQ ID NO: 280717 - protein, 57 aa, Glycine max
  Clone ID: PAT_MRT3847_9550C.1.pep
EALIRGKLFIKGFSSPLVEDSMRKACCSHEGSNGSCSPWSPSMGTLTMPSTVYIQWV

SEQ ID NO: 280718 - protein, 93 aa, Glycine max
  Clone ID: PAT_MRT3847_95510C.1.pep
TCLLSSPILVFLSGAPLMSFKIRDFHSKKMVNPRVLNLNLNSQAFSLGLSPSLGQLGLIPRGFKEGFCPAMVWEVHPYQRAPLGSPFFNRTWQ

SEQ ID NO: 280719 - protein, 53 aa, Glycine max
  Clone ID: PAT_MRT3847_95511C.1.pep
LGESSCQRHNSYTRYSDGVGPLSSLTLARIEQQEQVSYYERVGSRSGFWQAFE

SEQ ID NO: 280720 - protein, 67 aa, Glycine max
  Clone ID: PAT_MRT3847_95512C.1.pep
TTTTIAPLLFCTCACLIFFSASLSEATVVGYGYTISTVNNYPIKNSLTANLNLIKSSSVSGPDIPHL

SEQ ID NO: 280721 - protein, 70 aa, Glycine max
  Clone ID: PAT_MRT3847_95513C.1.pep
LTLSERRDKFLFYMGLKMKLELLNRPVPVFDSDERPCERLMTYSGDIDTYAPGDSYDVSMEESDFRNLLE

SEQ ID NO: 280722 - protein, 66 aa, Glycine max
  unsure (1)..(66): unsure at all Xaa locations
  Clone ID: PAT_MRT3847_95514C.1.pep
CIKAPRRKLPKGTCXKKKKKKKKKKKKKKKKKKKKKKKKKKKKKKKKKKKKKKKKKKKKKKRGGGF

SEQ ID NO: 280723 - protein, 115 aa, Glycine max
  Clone ID: PAT_MRT3847_95515C.1.pep
IVSVARIDSHPPMAFTVGIGSGGAIIPCGNRTTAIPYIRGGGGGLLFPDRTRSRNLHLHVACAKKKKKLLEKIELEFWEWFGTFLKYSWIIAIAVAVPTTLFNLRFFFPIGLGIS

SEQ ID NO: 280724 - protein, 60 aa, Glycine max
  unsure (1)..(60): unsure at all Xaa locations
  Clone ID: PAT_MRT3847_95516C.1.pep
GPNFPRXXLXHGCXRXRPFNNQXNFGHPKGNPNCYXXSSWLLLXEKGTKWXWLNENXXFP

SEQ ID NO: 280725 - protein, 53 aa, Glycine max
  Clone ID: PAT_MRT3847_95517C.1.pep
EICHRLYVAEQSAKTVTRLTHLLMVVFQGVFRGLRDSSHIKPFNRKRGQMGGS

SEQ ID NO: 280726 - protein, 47 aa, Glycine max
  Clone ID: PAT_MRT3847_95518C.1.pep
CLSHNVVSIQIPALYCANNIHLKCTGCLPAISYLRIIALRTLREECF

SEQ ID NO: 280727 - protein, 78 aa, Glycine max
  unsure (1)..(78): unsure at all Xaa locations
  Clone ID: PAT_MRT3847_95519C.1.pep
ISSSDLDILIIRAGNPVWVNATXHLKCFAFGINASNSQRNSLAXSKDTVISQIPSQVQELDVPASAXDIENLIKSHGE

SEQ ID NO: 280728 - protein, 60 aa, Glycine max
  Clone ID: PAT_MRT3847_9551C.1.pep
KNWFHPKIELVILDLKRYIFRENPLSGALNEVNFSPPWRAPFLGLPVFFSKFLLNSFIPL

SEQ ID NO: 280729 - protein, 126 aa, Glycine max
  Clone ID: PAT_MRT3847_95520C.1.pep
MGNYISCTLAPPLMKNTRAKRVIFPTGEVKQYKEQVINAAELMLECPTHFLTNSKSLHIGRRFSPLGADEELECGNVYIFFPMRRLNSMVTAADVAVLFMAANMATKRISSREDLISRDHSIDVIG

SEQ ID NO: 280730 - protein, 64 aa, Glycine max
  Clone ID: PAT_MRT3847_95521C.1.pep
TILLSEKVCAVEILFSHFSRVSILACLVPKIFDDSRVGNSVSKRDVFGKCWDESLGAANKSHVC

SEQ ID NO: 280731 - protein, 74 aa, Glycine max
  Clone ID: PAT_MRT3847_95522C.1.pep
MTAPCDTMDTDTDSEAVSIKQRSHIPYMDAVGDGGQKVNLDHSVRIENGPWKSAYLPHQAWTEALVCDPQNFTQ

SEQ ID NO: 280732 - protein, 71 aa, Glycine max
  Clone ID: PAT_MRT3847_95523C.1.pep
ELSIILLLSESATLASHMGASTNTSILKPLIFHHPEQLLYSHRSYLRLHTKSKTHCGANSRPMVSKATAAP

SEQ ID NO: 280733 - protein, 106 aa, Glycine max
  unsure (1)..(106): unsure at all Xaa locations
  Clone ID: PAT_MRT3847_95524C.1.pep
QLIESAPTVNVIQTRLHSSYVKKDQLHFEIKSSFRVKAXALYPYVKYNTVHATLNQLVYGVKPCNLVCSIGKHLHYKKIPSCSKTKFMHVLLKRTMYVIHNLGYKL

SEQ ID NO: 280734 - protein, 324 aa, Glycine max
  Clone ID: PAT_MRT3847_95525C.1.pep
MVRTPSCDKSGMRKGTWTPEEDMKLIAYVTRYGCWNWRQLPKFAGLARCGKSCRLRWMNYLRPNIKRGNFTQQEEECIIRMHKKLGNRWSAIAVELPGRTDNEIKNHWHTALKKRSQQNTLINEETKAIKSKNKESVHNNGVFVTLLATSQISDNSSLSPVSSTCSEFSSITSDLSTAASCMENLVFEDDDLGFLDLYNIDPMNGNLWTELNLDGISFNTPCEIVSGDTNSTFQSSSSSNSNTLDSPHQSTSESIVVNNDFGRFLDSYEEATVDNFWTQSYVADMSHVPSELFVPSVAESEYFTPLYDDLWGQTHLYHENHCLF

SEQ ID NO: 280735 - protein, 131 aa, Glycine max
  Clone ID: PAT_MRT3847_95526C.1.pep
APQATRVCGINASLKDVGLAVVATDASAVLASNALAIEVTLGTDDGSVVFSANSIYVVPGERIVFKNNAGFPHIAVADEDEMLRREDAWRISVSEQDLLNVGGERYTALWMSREPTRVLLPHQRAGLVGLV

SEQ ID NO: 280736 - protein, 65 aa, Glycine max
  Clone ID: PAT_MRT3847_95527C.1.pep
IIIRTYYKASFHHCGGTSILLLLLNTKTHHISKPHDNLLHSKNACYNQTTTAYIKTTMNYHTNTV

SEQ ID NO: 280737 - protein, 119 aa, Glycine max
  Clone ID: PAT_MRT3847_95528C.1.pep
CFFFFFFFFFFFFFFFFSFWFFVFFLTTIEKPLIFWRCWKTRPLYPGSQGGVSGPLVRLGSYLEKNKTWGEGSGTLCFNPAGGGGNLSGLKIGGAPPPFLVIIWGGGPIFFGGGEEFFS

SEQ ID NO: 280738 - protein, 47 aa, Glycine max
  Clone ID: PAT_MRT3847_95529C.1.pep
VLLTKRLMINVLKGTKWMIPSRKLLTCGKQKGSRGSARVQKKHYQCM

SEQ ID NO: 280739 - protein, 64 aa, Glycine max
  Clone ID: PAT_MRT3847_9552C.1.pep
ITCPHFLFSFLSHQFKKYLFSKNKNKKINSLEVKYYFSLHVMFYLDRQKRGQVIPIQFAVQQTV

SEQ ID NO: 280740 - protein, 307 aa, Glycine max
  Clone ID: PAT_MRT3847_95530C.1.pep
MVSASLQFWSWIAPTPISHRYTHKFASLTSLKLATPVSSTNTVYLPKPLVVRFALTESDSPKSIEPDPQTLLQEIADSFDLPSDYFSKLPGDLRLDLNDAAFDLSNGPVLDECGQELGETLLNLSRAWELADTSTSHSLVKKLPLIEAKLTGYAKSALGKRLVSAGRRFQSMGQYGQGELQKIAKAMIAAGRVLTASSTSAVIVEEPKEEARVLKFGELQVEVTPDKANIGAVIGFLFGILCWQIARGVQNVPDSSLQYANDNALLLAKSLKGALLAIFYSSTFLSAFTSVGLVLLGLQLKSKKNKD

SEQ ID NO: 280741 - protein, 54 aa, Glycine max
  Clone ID: PAT_MRT3847_95531C.1.pep
NPVAHSKGNAILIFHFRKRSIGKLRMWFWSQVACAPQTEGKVPFPIHLPFMRNS

SEQ ID NO: 280742 - protein, 205 aa, Glycine max
  Clone ID: PAT_MRT3847_95532C.1.pep
MVSASLQFWSWIAPTPISHRYTHKFASLTSLKLATPVSSTNTVYLPKPLVVRFALTESDSPKSIEPDPQTLLQEIADSFDLPSDYFSKLPGDLRLDVSSVQCFAVSVLSIIMQSFPLLINSKLKMLPCSESCMFLNFVKLNDAAFDLSNGPVLDECGQELGETLLNLSRAWELADTSTSHSLVKKLPLIEAKLTGYAKSGKSMRK

SEQ ID NO: 280743 - protein, 93 aa, Glycine max
  Clone ID: PAT_MRT3847_95533C.1.pep
QGGGPHWVPVPRKVDEHMFITIGFNTEFCDSKNPNNASCKGPNGQRFSASMNNESFAVPAGVKFSLLEAFYENMSGVYTTDFPNKPPVMFDFT

SEQ ID NO: 280744 - protein, 36 aa, Glycine max
  Clone ID: PAT_MRT3847_95534C.1.pep
DLGTCQLHSRKSKRHRPCSLDRQTNPIDQTELQAIP

SEQ ID NO: 280745 - protein, 61 aa, Glycine max
  Clone ID: PAT_MRT3847_95535C.1.pep
MKSTIFFALFLFCALSTSYLSSSIADFVLDNEGLPLDNGGSYYILSDITPFGAILAAPTGI

SEQ ID NO: 280746 - protein, 38 aa, Glycine max
  Clone ID: PAT_MRT3847_95536C.1.pep
FKSRTTFRLTWCSGQDSCGCTPTTGKTKEAVTGALIAE

SEQ ID NO: 280747 - protein, 48 aa, Glycine max
  Clone ID: PAT_MRT3847_95537C.1.pep
ILPRGVNMRSAHTTLPVLIRRFLTLSLSCVSCDMHPQFSQINISVTWR

SEQ ID NO: 280748 - protein, 227 aa, Glycine max
  unsure (1)..(227): unsure at all Xaa locations
  Clone ID: PAT_MRT3847_95538C.1.pep
RVSCEIEGRERERMEQIPLFNEKMKLAQKAAMAKRWEDFKKIMKDDQENLLKQFDLFENSAIHVATRSNSPRLLRELIEMLPKEERWQALCKENREGNTVLHEVVFCKKKKMADVVFEIEDELLLQQQSSSLEEKRTLLDMRNHRGETPLFMAAMHGKLKMLKHMANRTGTRNMEDFRKHLHRSDKYSALHASVMGQHXDVAIWLVRMNRELAMXKDEKELTCLQLL

SEQ ID NO: 280749 - protein, 304 aa, Glycine max
  Clone ID: PAT_MRT3847_95539C.1.pep
MLVVSLGRINVSSVCAKTRKCFSSKSHLHTFTPASVSHQKFPEDPMICTNELPQISSEAPAHWKMVLQGIRQMRSSADEHQPVSREKAADTVPPKERRFAVLTSSLLSSQTKEHVTRGATQRLGENDLLTADAMDKADEETIKKLIYPVGFYKRKASNLKKIANICLLKYDGDIPSSIEELLLLPGVGPKIAHLVMIVGWNNVQGICVDTHVHRICNRLGWVSRPGSKQKTLTPEETRQALQRWLPKEEWVPINTLLVGFGRAICTPLRPHCGDCSVNRFCPSAFKETSSLSSKSKRFTSNKKP

SEQ ID NO: 280750 - protein, 327 aa, Glycine max
  unsure (1)..(327): unsure at all Xaa locations
  Clone ID: PAT_MRT3847_9553C.1.pep
YPRFWSSPKYHEERFNSYQSVLCGLSWPSDRIIIQVLDDSTNPTIKELVQMECSRWASKGVNIKYEVRDNRDGYKAGALKEGMKRSYVKQCDYVAIFDADFQPEPDFLWRTVPFLVNNPELGLVQARWKFVNANECLMTRMQEMSLDYHFTVEQEVGSCTYAFFGFNGTAGVWRISALNEAGGWKDRTTVEDMDLAVRASLKGWKFLYLSDLKVKNELPSTFKAYRYQQHRWSCGPANLFRKMVMEIINNKKVSLWKKIHVIYSFFFVRKVVAHINTFVFYCIVLPATVLVPEVVVPKWXAVYIPSIITILNAXGTPRSLHLMVFWI

SEQ ID NO: 280751 - protein, 63 aa, Glycine max
  Clone ID: PAT_MRT3847_95540C.1.pep
VHRCSFNGYFGFLPDLIQFRKFGTIDNSKFTILYVKLSIFVQVYAITYPHTISIDLFLQLLIC

SEQ ID NO: 280752 - protein, 125 aa, Glycine max
  unsure (1)..(125): unsure at all Xaa locations
  Clone ID: PAT_MRT3847_95541C.1.pep
LIPCACTEWFDAIPYDLDPGVLTVRGAHYIWMIMAMVGSLLATLTYYWMINMPETAYDTALGTNNTRLAAVDYVSXVCLFEIKLNHKTRSIWLTHMAXTSKDFLSRHVLHLLCTXSTWYLLDIAF

SEQ ID NO: 280753 - protein, 88 aa, Glycine max
  Clone ID: PAT_MRT3847_95542C.1.pep
CCQREGDFNLVGLHYLFCIFIGFTTNMYFLIITDKVVSCLCKKRMKENTLVKQTTKQVIKRPGGPPCRHFRNLGLNSRPVPGQMTMVH

SEQ ID NO: 280754 - protein, 197 aa, Glycine max
  Clone ID: PAT_MRT3847_95543C.1.pep
MVQVQSITLKHLSLPTHTFVPPKFNIPLNRNLSFTPKFTFSTSLSVRCYHPNLVQPKPFPPLPQRPPVAELPQQRVYVGYSVYTRKGVLTVTPRPPEFESKSSGAFKVSKEGYVVLQFAPSVGADEPIYDWNQKQIFSRGFLNEPFLIHFGVRDVDFMNDLFFKSMSNEIEVRKVLKVEPLLDATGHLFSLSNSLYS

SEQ ID NO: 280755 - protein, 73 aa, Glycine max
  unsure (1)..(73): unsure at all Xaa locations
  Clone ID: PAT_MRT3847_95544C.1.pep
MSCCGGNCGCXSSCNCGNGCGXCKMYPDLSYTESTSNETLCQGSGXTVKVQFEGAEIGXPAENDSCKCRPNCS

SEQ ID NO: 280756 - protein, 778 aa, Glycine max
  Clone ID: PAT_MRT3847_95545C.1.pep
MNSDNQQQSEEPGNAQKSLEHSADIAQPQSPNQTTAGTSTLTAEDTEKPKCAVCGEENAKMHYGVLACLGCKGFFRRALKKLNEYECLRNNNCIIDKQERNSCRSCRLQKCLDVGMDPAAVRPDRDFTGKQQLARRFSHSKGSSNHKSSQPMGKCSGERKGGGRDEETAGNWAHRLPVEMRTMVMTLQNIEAKVVHGDTAKDAAEIYPLRVNTIREIIEEPTKLRGRRTEMRYEPYRMAKNEEFSVIVYRRLIAAIDWVELLAERMGGLSIEDRIALVKSCFGPLTLFKCSARTAVVTSNENLLCLCNFAYVPREINKAYNDAYHLENGLVDRLLNELVAPFRKIHLAEEEIVCVSAIIVLNPMARDLSENAAEKVFQLRNRVYTTLYQIIKECRPNCNTNATFGNLLLYLPIITSLANAMSDNLRFAQTFSAHGGSPLLTSLFGCFPVEPFVDSEMALVKAVEGKCIAEKRVQTEEEKKIKAKEKKETVLQKQKRRKSDAGTQTEWKSQLNQITRKRRLCPLASVEESNEFHLLKAPCSYTLTEMFDDRINNCGVDEIEEEEEDNMEKNYGNNATLPFGTENRRLIRTTSYQQMHLQQGIDEQQEFRRPSATWTNAPSQNQSQSHGQQQTQNWPQPQQQQCWPTNSASTSKGIPAILPPTTQIQGLFLNEPSSSSQQQYFQGARQYGDSQWTVPPSSSMQMQSNFTPIYLPYSSSISPHFASNIPTQIHYSQSAAQYFPQQFAPSFYPPEPQSQQQFTYLTVNPQQQFFNDNNTNNN

SEQ ID NO: 280757 - protein, 83 aa, Glycine max
  Clone ID: PAT_MRT3847_95546C.1.pep
PSQAPVSKQPTPIIAVRALLHLFSKPWFITKQCSSKVKSRLLEFACIPIFSLINLQHMACIPTRSERVSLDHNPNCLGRLQMN

SEQ ID NO: 280758 - protein, 64 aa, Glycine max
  Clone ID: PAT_MRT3847_95547C.1.pep
GGKKKFGRLGSLQANCQTGTHLFFCLGKSPATNARPRLRSFFLAKKKKKKKKKKKKKKKKKKKK

SEQ ID NO: 280759 - protein, 82 aa, Glycine max
  Clone ID: PAT_MRT3847_95548C.1.pep
RNKFKENSIYLPIMSLNFRGSATVNRESRDGLALCQFKEDIVVECNKHKHVYLSDAWEGLMKKVHSNGYGMISEERHNGNYQ

SEQ ID NO: 280760 - protein, 58 aa, Glycine max
  unsure (1)..(58): unsure at all Xaa locations
  Clone ID: PAT_MRT3847_95549C.1.pep
KTTFTAGVIAYSAEKERRKNLSVWEFCVLEESRGKAEAQVLRFXLQLQLQTXNKINLF

SEQ ID NO: 280761 - protein, 205 aa, Glycine max
  Clone ID: PAT_MRT3847_9554C.1.pep
MVDLEGTEGYSNETLINLTDSTELLFLKLPSSNDFLSDIHGQKLFLTLHNDGKLASFEDSSGKVYDFVSYSAQEPDETVFVPSTEPKIGKISMRVSTVHYPGPKELEKLNSTNAKHAHGNSSGVTGTTSSRYFPMQSGGAASSKGSRQRSSLTEASEPSSISKRRHASKSKSNLSETSHEHSTGISSMSPNHSHEGKAKRRKHKE

SEQ ID NO: 280762 - protein, 85 aa, Glycine max
  unsure (1)..(85): unsure at all Xaa locations
  Clone ID: PAT_MRT3847_95550C.1.pep
ASKRLLNELKDLHKDPPPPCPTSSEDMFHWHAPIVASAYSPPSGSLFLITIHLPSDYPFSPTNASFRTXVFHPNIIMHRLFCADM

SEQ ID NO: 280763 - protein, 83 aa, Glycine max
  Clone ID: PAT_MRT3847_95551C.1.pep
KKKKNLLWGQGGKKPPPIGGGGGKKIKKLASPRTGGGIHPKRPKPKRVFFNNLGGPKGEAAPPEKKKNPEKRLKKPLMVQTCF

SEQ ID NO: 280764 - protein, 97 aa, Glycine max
  Clone ID: PAT_MRT3847_95552C.1.pep
SSPTFAPPSHNPACDYYYSLRFFGKSLCSKSAEEIQRGCWNCHTVPHSEPFLVCELCQCIQPVDSSIDYFDIFGVERKYDIEGENLEGKYKDWQKKL

SEQ ID NO: 280765 - protein, 85 aa, Glycine max
  unsure (1)..(85): unsure at all Xaa locations
  Clone ID: PAT_MRT3847_95553C.1.pep
SARPXRTHTHHRKRPEGRQQQRHEASSNEGLHFRKWFCRYYVLGVLEQRXXVTTXRRLXXEVSVTSNIQVSKTVDAGIXRQRECV

SEQ ID NO: 280766 - protein, 96 aa, Glycine max
  unsure (1)..(96): unsure at all Xaa locations
  Clone ID: PAT_MRT3847_95554C.1.pep
KKPPWVRSSTVTLXEIQKYRNSWKLLMXKLSLQRLGREIAPDFRTNMGIPTSTDSRTLTTRXVYLRGRFEYTNLWAIHAKRRTIYVLGYTTAHNNQ

SEQ ID NO: 280767 - protein, 96 aa, Glycine max
  Clone ID: PAT_MRT3847_95555C.1.pep
MASVWSVSITASSFTAAPARAVVSRRSFTVRASLRKATATAAVAVAASVLLAGGGAMAQEVLLGAGDGGLVFEPYQFTVKAGNTITFKNNACFPHN

SEQ ID NO: 280768 - protein, 246 aa, Glycine max
  Clone ID: PAT_MRT3847_95556C.1.pep
GYVDEWEIAPRFSDLLANTSVQFFKDRVKVLNPSDHWGMNGSKASSCGGTVHLESGLLIEYDWLVLALGAEAKLDVVPGAIEFAIPFSTLEDARKVNDKLTKLERKTFGTDFQISVAVVGCGYSGVELAATLAERLQNRGIVRAINVETMICPNAPPGNREVALKVLSSRKVELLLGYFVRCIRRLSDLESSDPLTGVDENSTEVVPDFEKYILELQPAERGMQSKIIEADLVLWTVGTKPPLPQL

SEQ ID NO: 280769 - protein, 115 aa, Glycine max
  Clone ID: PAT_MRT3847_95557C.1.pep
TSVGTRTYQLQHCVMFFSTTLGVATPPCTTSPPQLVRKTPNPSPSCCCLYNFVQDFFPFPCFLFTIKDLSHLLLFFVLQFKICSPSPCFFLLLIQDQFSHIRSPLFSTVFFLLLW

SEQ ID NO: 280770 - protein, 115 aa, Glycine max
  unsure (1)..(115): unsure at all Xaa locations
  Clone ID: PAT_MRT3847_95558C.1.pep
SEKTVKGVGQIGDRLKETQAINXSLSSLSDVIXALAKKEEHVPFRNSKLTHFLQPYLGGDSKTLMVVNVSPDQSSAGESLCSLRFAARVNACEIGIPRRQTQTSTRSSESRLSYG

SEQ ID NO: 280771 - protein, 123 aa, Glycine max
  Clone ID: PAT_MRT3847_95559C.1.pep
GGRGPTLLLKIKNIPIYLKKRVSGPTTPKKSFYLGGKPGFTRGPTPVLSQRGGGGHNNHLGQKRTRFWKAKIQRRGLKKNPPFKKGFTPPQFKHPGGGWAHLNGGFQKPRRVLVPGNTGGGAP

SEQ ID NO: 280772 - protein, 525 aa, Glycine max
  Clone ID: PAT_MRT3847_9555C.1.pep
MESFQGDRDDISYQMGLIWSQVKEPVIVPMLRVAVFLCLAMSLMMLVERVYMGIVICLVKLFSRRPEKRYKWEPMKDDIELGNSCYPMVFVQVPMYNEREVYQLSIGAACGLSWPSDRIIIQVLDDSTDPTIKELVQMECSRWASKGVNIKYEVRDNRDGYKAGALKEGMKRSYVKQCDYVAIFDADFQPEPDFLWRTVPFLVNNPELALVQARWKFVNANECLMTRMQEMSLDYHFTVEQEVGSCTYAFFGFNGTAVGLLWRISALNEAGGWKDRTTVEDMDLAVRASLKGWKFLYLSDLKVKNELPSTFKAYRYQQHRWSCGPANLFRKMVMEIINNKKVSLWKKIHVIYSFFFVRKVVAHINTFVFYCIVLPATVLVPEVVVPKWGAVYIPSIITILNAVGTPRSLHLMVFWILFENVMSLHRTKATIIGLLEASRVNEWVVTEKLGDALKAKAGGKAPKKPRFRIGDRIHLLELGVAFYLFFCGCYDVMFGKNHFFIFLFIQSFAFLIMAFGYVGTIVPNS

SEQ ID NO: 280773 - protein, 93 aa, Glycine max
  Clone ID: PAT_MRT3847_95560C.1.pep
MAFRSASLSRSLMSTARASLRQAAPSSPLPRLCPPPLAAPRVQSRRFSMPASRNLGQLGCIQSLLPLTITCMTSHVAVSARACCELSHGDPDS

SEQ ID NO: 280774 - protein, 98 aa, Glycine max
  unsure (1)..(98): unsure at all Xaa locations
  Clone ID: PAT_MRT3847_95561C.1.pep
IPIDTEIAFRSGSLSRSLMSTARASLRPAAPSSTLPRLRPPPLAAPRVQSRRFSMPASRNLGQLGCTHSLLPLGSXITCMTSHIAVSARACCELSHGT

SEQ ID NO: 280775 - protein, 58 aa, Glycine max
  Clone ID: PAT_MRT3847_95562C.1.pep
PLFGVAFTINGPNSLNILFPISNPWVGLFSTRSSPFSFYYACWYLLPHTPLNFPFEST

SEQ ID NO: 280776 - protein, 64 aa, Glycine max
  Clone ID: PAT_MRT3847_95563C.1.pep
VGLLCVQERPEDRPNMSSVVLMLNGDRPLPRPKLPAFYPHQEDFSSSSKCEFSSNELSITLEAR

SEQ ID NO: 280777 - protein, 190 aa, Glycine max
  unsure (1)..(190): unsure at all Xaa locations
  Clone ID: PAT_MRT3847_95564C.1.pep
MMDCGVKRRESVREEDDEVMIVTPLGAGNEVGRSCVYMSYKGKSILFDCGIHLGFSGMSALPYFDEIDPSTLDVLLITHFHLDHAASLPYFLEKTTFRGRVFMTYATKAIYKLLLSDFVKVSKVSVEDMLFDEQDINRSMDKIEVIDFHQTVEVNGIRFWCYAAGHVLGAAMFMGDIXGVRGLYTGDYSR

SEQ ID NO: 280778 - protein, 43 aa, Glycine max
  Clone ID: PAT_MRT3847_95565C.1.pep
TRPEHCCKDPAEALGDVSTMNLLPSPTATGVNDELLTPNYTID

SEQ ID NO: 280779 - protein, 48 aa, Glycine max
  Clone ID: PAT_MRT3847_95566C.1.pep
SNWLGIDVWVHKSLEKLETPVILISKCHTLSVKVVKSDISLSIRCVRF

SEQ ID NO: 280780 - protein, 95 aa, Glycine max
  Clone ID: PAT_MRT3847_95567C.1.pep
GDTDMLNTMHQDAMDITSKTLHCLHVTEPIKITRFINKDYDTMHGPDWQCIVGTDFGSMETHCGGCFIYICLSNSAIMLCRRYAATDAPENRCSS

SEQ ID NO: 280781 - protein, 53 aa, Glycine max
  Clone ID: PAT_MRT3847_95568C.1.pep
GSHLTLETDEHGGLMLLVQISLLAAACKARRSYHYHSLSTREATCQASGPAPP

SEQ ID NO: 280782 - protein, 55 aa, Glycine max
  Clone ID: PAT_MRT3847_95569C.1.pep
WLNSCRAPDAQEGPHIACPYTHHKSLMFTRSSPQHAQRCNQFSLFCLASVVLESD

SEQ ID NO: 280783 - protein, 132 aa, Glycine max
  unsure (1)..(132): unsure at all Xaa locations
  Clone ID: PAT_MRT3847_9556C.1.pep
SIEPDMNSRFQLLSTTTNGDFVQGKDLATVKVNVTCAAVGXTSSYTPTPLVESGMQKDRCVIVEYFGRMSYVAHNVNQPQEKDLLEGXIFSLIINSLSRMEKVSSTXAQFCCGKNLKYEITGGWVTFLKEFS

SEQ ID NO: 280784 - protein, 134 aa, Glycine max
  Clone ID: PAT_MRT3847_95570C.1.pep
MEGAKEELERRSKFLKSLIQKKKTIEQQEQHDHLQHNNVRVRACDMPLPLQSRAFRCARDLLDSMPPKKLDSKRLALTLKKEFDSSYGPAWHCIVGTSFGSYVTHSFGGFVYFSIDKGLMSFSSKTAVEPLDHS

SEQ ID NO: 280785 - protein, 205 aa, Glycine max
  Clone ID: PAT_MRT3847_95571C.1.pep
VAQRSYKGRHCKKFYTEEGCPYGDSCTFLHDEQSKNRESVAISLGPGGYGGGGGGGGGVGGGASGGNGGANAAGNGPNSKPSNWKTRICNKWEMTGYCPFGNKCHFAHGATELHRYGSGLIEGENFDAASAVAGDTNKGVPSKASADNVVAAVTLVAHSDVYHIGVPSQRPSSMVIQRPGQRAHQKWKGPDKISRIYGDWIDDIE

SEQ ID NO: 280786 - protein, 75 aa, Glycine max
  Clone ID: PAT_MRT3847_95572C.1.pep
IGEMNHNNNNRARYPPGMGLGRGGFNPNPSQNPNLNQNPSLNQNHHAFQARPPYHHQLPYLHLPSFLCLMSVLVH

SEQ ID NO: 280787 - protein, 52 aa, Glycine max
  Clone ID: PAT_MRT3847_95573C.1.pep
QQKYCFSFLLEEIMAYSTLSPIKNLVNLSEESNLDERHEKKEKKQKQKYLRK

SEQ ID NO: 280788 - protein, 52 aa, Glycine max
  Clone ID: PAT_MRT3847_95574C.1.pep
MEILEWRLVFLENIASREKRWVSASHADVGLETHILFRKFAFCLSSHVLPFP

SEQ ID NO: 280789 - protein, 84 aa, Glycine max
  unsure (1)..(84): unsure at all Xaa locations
  Clone ID: PAT_MRT3847_95575C.1.pep
FQVLPETCLTFYGPKRIPIHMVPTEQAVEFYQTELGFLLTPPSGGENAENWKGLESERKLQIKFEVVDRPAXDIAISGLGWFTV

SEQ ID NO: 280790 - protein, 130 aa, Glycine max
  unsure (1)..(130): unsure at all Xaa locations
  Clone ID: PAT_MRT3847_95576C.1.pep
TEKGFVGGHVSQSRFAHLSLTDSSAAASCGVPSRSQGTRHEMLHIQGGQCGNQIXSKVWDVVCTDDGIESTGRYHRDNQVQRDRVKVDYNDANCGRFVPKAVLKDSDPXTMDSVIYGHYSHIFRTDNIVL

SEQ ID NO: 280791 - protein, 89 aa, Glycine max
  unsure (1)..(89): unsure at all Xaa locations
  Clone ID: PAT_MRT3847_95577C.1.pep
MARTMNTARISTGGKAPRRQLATKAARFSATITSGVKKPHHYHHATVALREIRRCRIANXLLIWKHPFQRFVREIAHDFKIALTFQSHA

SEQ ID NO: 280792 - protein, 167 aa, Glycine max
  Clone ID: PAT_MRT3847_95578C.1.pep
VLQGLQYLHNKGVVHCDIKGGNILIGEDGAKIGDFGCAKFANDSSAVIGGTPMFMAPEVARGEEQGYPADVWALGCTVLEMATGFAPWPNVEDPVTVLYRVAYSDDVPEIPCFLSEEAKDFLGKCFRRNPKERWSCGQLLKHPLLGEFSSNDKKIQESNSCSPTSIL

SEQ ID NO: 280793 - protein, 87 aa, Glycine max
  Clone ID: PAT_MRT3847_95579C.1.pep
CSGVKDTIRSTASWSNVFATSSTFSSASSSDGDAEHESSKVARSHPYRNGQSRNRSKSEMEDLLARRHARCSIIEDRATVTIDAHVI

SEQ ID NO: 280794 - protein, 39 aa, Glycine max
  Clone ID: PAT_MRT3847_9557C.1.pep
GRVPKISWKKLWLYNGPGFLRSIENLDHGNLKGDLQAGA

SEQ ID NO: 280795 - protein, 78 aa, Glycine max
  unsure (1)..(78): unsure at all Xaa locations
  Clone ID: PAT_MRT3847_95580C.1.pep
ILGTMENLQRNVLGINNITSVGEIEDQGLGLICSALNALTFAVTXIYIHPTITNKAAGGTGTKGLNTVIIRKVTLPTL

SEQ ID NO: 280796 - protein, 27 aa, Glycine max
  Clone ID: PAT_MRT3847_95581C.1.pep
LLLEYNRKLNVYYAVTWLLLRYSSKFL

SEQ ID NO: 280797 - protein, 129 aa, Glycine max
  Clone ID: PAT_MRT3847_95582C.1.pep
ICLNYFLIVSLYVDDLLVTRDDARLVEEFKQEMMQAFEMTNLGLMTYFLGIEIKQSQNKVLICQRKYAKEILKKFQMEECKSVSTPMNQKEKFNKVDGADKIDEGYYRSLIGCLMYLTATRPDILFAIS

SEQ ID NO: 280798 - protein, 97 aa, Glycine max
  Clone ID: PAT_MRT3847_95583C.1.pep
KPPKSAPLLFYFYSPPPYIEKISLSLLTLPSPQKGKILGWAPFFGLQTHFLLDFRKKGTFLKPPQRGSKKFSLKVLFPPQNKIKNPFFYFSSPILKS

SEQ ID NO: 280799 - protein, 125 aa, Glycine max
  unsure (1)..(125): unsure at all Xaa locations
  Clone ID: PAT_MRT3847_95584C.1.pep
KGYPENKAPSLEHNGKAXGESLDLNKYVNANFERTPLFPSDPAKKECRETQISQVXTFRKNLCGSLKGDAVQEARPALEYXEIALGQFKDDPFLHRQTRLADIAYTACVERKQNECAEEFKHDIT

SEQ ID NO: 280800 - protein, 73 aa, Glycine max
  Clone ID: PAT_MRT3847_95585C.1.pep
HASALLSFIANQASFPAWSGPALRHNTVPTNRFYHIYSFSSLISKIQPFSLCLSIFPIKIRFLSGIPFHFLLY

SEQ ID NO: 280801 - protein, 28 aa, Glycine max
  Clone ID: PAT_MRT3847_95586C.1.pep
YNNILQIDTIVIITIKLASRRYYDIVDR

SEQ ID NO: 280802 - protein, 57 aa, Glycine max
  Clone ID: PAT_MRT3847_95587C.1.pep
ISPLIFRLRRTLNRSRVFSLLAPNCCGMPLHCFMIVYVIPKSMREFLQVLCYRDTHF

SEQ ID NO: 280803 - protein, 107 aa, Glycine max
  unsure (1)..(107): unsure at all Xaa locations
  Clone ID: PAT_MRT3847_95588C.1.pep
ARNSAREHSQNGGXXXXEKXLXXNFXXXXXSXSTXFETLXGKXXNXXGVXXXXTGAXFXXXKXLXKSLGXTPXGXQIFRNCXPKKXVFXGXFXGXXGPPSXXGXXXX

SEQ ID NO: 280804 - protein, 73 aa, Glycine max
  Clone ID: PAT_MRT3847_95589C.1.pep
LSTTIFLNKSQTPVLPFFYFSKAFTILVKQGVAPFWLKGRCQLLGIPSGASAFSVHVESYLLTVTWSHDLHGS

SEQ ID NO: 280805 - protein, 403 aa, Glycine max
  unsure (1)..(403): unsure at all Xaa locations
  Clone ID: PAT_MRT3847_9558C.1.pep
MVDTDTMLLILALSGQKLVLGSERKLRKLTEMSCISLAEFLLIVLFVDSKVAEHKTLIPIGIGVLPLYWLFSITMIGSLTFGPGQRHPEEEASXPPPQNKDAGESQLASDEVILSELEDEKPKEVDMLPASERXENRIAHLQQRLLQAAAEGAVRVKRRRGPHRGEDFTLTQALIKADFWLLFISMIMGSGSGLTVIDNLGQMSQSLGFDNAHIFVSMISIWNFLGRVGGGYISELVVRDHAYPRPVALAVFQLIMTLGHVFLGMGWPGSMYVGTLLVGLGYGAHWAIVPATASELFGLRNFGALYNFITIANPAGTLVFSSLIASTIYDAEAEKQHRQNMMLLVLNASEPLKCEGSVCFFLTSMIMAGLCVVGAGLCMVLVLRTRIVYANLYGKASSSRLRL

SEQ ID NO: 280806 - protein, 57 aa, Glycine max
  Clone ID: PAT_MRT3847_95590C.1.pep
NFMLSSFVSFVKNPYCRNKGLVFSFQGKSKSLGTLNVTVYKIVNCSVPPDLQKKIRV

SEQ ID NO: 280807 - protein, 46 aa, Glycine max
  Clone ID: PAT_MRT3847_95591C.1.pep
LGTVIFTFTSLAELQDLGELRVLFSVLWKTSHLGNSCQVVLACVYF

SEQ ID NO: 280808 - protein, 84 aa, Glycine max
  Clone ID: PAT_MRT3847_95592C.1.pep
PGQIIKKPKKKNGYNKQISTESHLKVPKKNKLSFNGKTPYTSWEKKKKNPPGLKQGGKKKAPHWGPKALKKMGNVAEIAFPTKT

SEQ ID NO: 280809 - protein, 58 aa, Glycine max
  unsure (1)..(58): unsure at all Xaa locations
  Clone ID: PAT_MRT3847_95593C.1.pep
LSTELLNSGLSWVRAFEINCANKXEWCNSGSPSNFNTATKFCPPNYALPNKMAGWCNP

SEQ ID NO: 280810 - protein, 197 aa, Glycine max
  unsure (1)..(197): unsure at all Xaa locations
  Clone ID: PAT_MRT3847_95594C.1.pep
MADAEDIQPLVCDNGTGMVKAGFAGDDAPRAVFPSIVGRPRHTGVMVGMGQKDAYVGDEAQSKRGILTLKYPIEHGIVSNWDDMEKIWHHTFYNELRVAPEEHPVLLTEAPLNPKANREKMTQIMFETFNTPAMYVAIQAVLSLYASGRTTGIVLDSGDGVSHTVPIYEGYALPHAILXLDLAXXRDLTDALMKILT

SEQ ID NO: 280811 - protein, 136 aa, Glycine max
  Clone ID: PAT_MRT3847_95595C.1.pep
MADAEDIQPLVCDNGTGMVKAGFAGDDAPRAVFPSIVGRPRHTGVMVGMGQKDAYVGDEAQSKRGILTLKYPIEHGIVSNWDDMEKIWHHTFYNELRVAPEEHPVLLTEAPLNPKANREKMTQIMFETFNTPAMYV

SEQ ID NO: 280812 - protein, 157 aa, Glycine max
  unsure (1)..(157): unsure at all Xaa locations
  Clone ID: PAT_MRT3847_95596C.1.pep
RAVNLFCDIGRLSMAARYLKYTKLSESLLTCGNWVHYFIHXEIAELYEGEQNIEQALVYYEKSADFFQNEEVTTSANQCKQKVAQFAAQLEQYQKSIDIYEEIALNLKHIFEIVTKLILTLGEYDYDVTLQCTLQSEESFIPRWLFSSLSESSSNPF

SEQ ID NO: 280813 - protein, 83 aa, Glycine max
  Clone ID: PAT_MRT3847_95597C.1.pep
MPGNIVERPLKTMFPGIADRMSKEITALAPSSMKIKVVAPPERKYSVWIGGSILASLSTFQQMWIAKAEYDESGPSIVHRKCF

SEQ ID NO: 280814 - protein, 381 aa, Glycine max
  unsure (1)..(381): unsure at all Xaa locations
  Clone ID: PAT_MRT3847_95598C.1.pep
MADAEDIQPLVCDNGTGMVKAGFAGDDAPRAVFPSIVGRPRHTGVMVGMGQKDAYVGDEAQSKRGILTLKYPIEHGIVSNWDDMEKIWHHTFYNELRVAPEEHPVLLTEAPLNPXKANREKMTQIMFETFNTPAMYVAIQAVLSLYASGRTTRTTGIVLDSGDGVSHTVPIYEGYALPHAILRLDLAGRDLTDALMKILTERGYSFTTSAEREIVRDMKEKLAYIALDYEQELETAKTSSAVEKSYELPDGQVITIGAERFRCPEVLFQPSMIGMESPGIHETTYNSIMKCDVDIRKDLYGNIVLSGGSTMFPGIADRMSKEITALAPGSMKIKVVAPPERKYSVWIGGSILASLSTFQQMWIAKAEYDESGPSIVHRKCF

SEQ ID NO: 280815 - protein, 163 aa, Glycine max
  Clone ID: PAT_MRT3847_95599C.1.pep
MQEGSPGRSGNLLSTVSQVTNAPMQDMSLTSRKLFTEDGQELISPETEMLTIQGPDGVVYQVQGQLEDGAQTLLVQGEDGEQRCVYVTTNQEGEDGSTVLTLDSAYADALSQVDSNQVSILGDGSQLLVQNEDGTTTLGDSQLMSVMEGGDKDDTQAQIVAQV

SEQ ID NO: 280816 - protein, 80 aa, Glycine max
  Clone ID: PAT_MRT3847_9559C.1.pep
NGTNFITIFLGGKSKPPQNLFFCLKQKQRGAENPGKTPCPKNPNQFGPTNPPGGDSSCLTFPTKFGGRIKPKGGGGSLFF

SEQ ID NO: 280817 - protein, 36 aa, Glycine max
  Clone ID: PAT_MRT3847_955C.1.pep
PKLDGSCPNEHFWELRLQGKRFQATLRIFQRKPEET

SEQ ID NO: 280818 - protein, 388 aa, Glycine max
  Clone ID: PAT_MRT3847_95600C.1.pep
MGEHNTTEKKGAKRQIRNRKGIEQNKIVHKHKGTNQPLRIRVFFSLRLAIKFDFVQLTPSMFGWRKLHGKGKGKGRRMWGDWKILKAGDERELKGDNLNVIDPYLFQQPSSNIDSHPPSLRRSHFFEVPHINQIYTWDCGLACVLMVLKTIGVNNCDIPTLAELCRTTSIWTVDLAYLLQRFAVAFSYFTVTFGANPNYCIESFYKEELPNDLVRVDLLFQKAMEAGIDIQGVNSVQLVAILPHTLSTGNKSISAEEISILILSGKYVAIALVDHNKLSHVLQDVPVPGVFSNNSGYTDVFFPSGSYYLQLSYTCHYVLICGYDAGADMFEIRDPGSSKKHKRISSKSLEEARKAFGTDEDLLLISLEKSSNHHQPFMQLSNDVNTDS

SEQ ID NO: 280819 - protein, 150 aa, Glycine max
  Clone ID: PAT_MRT3847_95601C.1.pep
RATPLYNHREAPPEEIIPLLQISGLYPIMKLAQLKVNGALVNAFIERWRPETHTFHLKYGEATITLQDVSVLLGIPVDGRPLIGNTNIDWFELFHELLGVMPDDAAIDGNSIKLSWLSSHFANIHDFTGNQEGLERFVRAWILRFIGGVM

SEQ ID NO: 280820 - protein, 88 aa, Glycine max
  Clone ID: PAT_MRT3847_95602C.1.pep
MWPICLLFNKILKAGDERELKGDNLNVIDPYLFQQPSSNIDSHPPSLRRSHFFEVPHINQIYTWDCGPACVLMGLKTFVSPTAISKHC

SEQ ID NO: 280821 - protein, 73 aa, Glycine max
  Clone ID: PAT_MRT3847_95603C.1.pep
PPRTERDQERGIGLLMDRGRMFITQLYYFLSTSDNQIFDSLVFLFLVLTKFQPLPSLSRCNSLFFKLDVHLGR

SEQ ID NO: 280822 - protein, 78 aa, Glycine max
  Clone ID: PAT_MRT3847_95604C.1.pep
MWPICLLFNKILKAGDERELKGDNLNAIDPYLFQQPSSNIDSHPPSLRRSHFFEVPHINQIYTWECGLACGLMGLKTI

SEQ ID NO: 280823 - protein, 112 aa, Glycine max
  unsure (1)..(112): unsure at all Xaa locations
  Clone ID: PAT_MRT3847_95605C.1.pep
FSKNQFFRPGPFFFTPFFGNFKSRPPPFNEGGFMDFPFLQSLRTKIKGPLNAEWVSVKDAYGDGGHVTLYVGAPPFEGQSPVYRQRVVFXALWGGLPPVVFVFVQMTPSPPF

SEQ ID NO: 280824 - protein, 194 aa, Glycine max
  Clone ID: PAT_MRT3847_95606C.1.pep
PTRPPTRPECVTDLAQAAACRNSAAATHLKVISICTIFVTSVMGVSTPVMLARYFQGKSLYDIAILLIKCFAAGVILATSLVHVLPDAFAALSDCQVASQHPWKDFPFAGLVTLIGVLMALLVDTVASSHMEHGHYTPVETLEKEGGSSAWSIELAGGGGEVQRVEELMRLKQRLVSQVLEIGIIFHSVIIGVT

SEQ ID NO: 280825 - protein, 51 aa, Glycine max
  Clone ID: PAT_MRT3847_95607C.1.pep
YDSHGINVTNIHPLVRLSILLHSMDSVIVSHVIRMEIESHHLVHDMSGLIL

SEQ ID NO: 280826 - protein, 53 aa, Glycine max
  unsure (1)..(53): unsure at all Xaa locations
  Clone ID: PAT_MRT3847_95608C.1.pep
SSLQIDFXKDCSNGYAISVXXTXLXXCYILNVLDFILCYYLRGERKRTSFSSA

SEQ ID NO: 280827 - protein, 53 aa, Glycine max
  Clone ID: PAT_MRT3847_95609C.1.pep
KMLVYNSKSVDPIKGSLPEALALSNGLHSMMAVPYGLCCLCFTPLYYIFRWYR

SEQ ID NO: 280828 - protein, 87 aa, Glycine max
  Clone ID: PAT_MRT3847_9560C.1.pep
NIFLIQKLINDPIPDFHEVLGFFFHLHKYAYLIHISSLLLSPLVDFFQFSKSPILTLLSIQYDYWLVQHITLSTTQSFTITFLCQVR

SEQ ID NO: 280829 - protein, 71 aa, Glycine max
  Clone ID: PAT_MRT3847_95610C.1.pep
GEQVNEILCRSSVWSAFKDHKHDLFISESQTAGYLTGPGVAGYLTAGTSTSVMSNLPPPVDHEAGDLGYQT

SEQ ID NO: 280830 - protein, 63 aa, Glycine max
  Clone ID: PAT_MRT3847_95611C.1.pep
IWHNLFETTLWPKSQVRYTSFASLVVNLNNSIALYCGTHKIYYFPRLKIYCRYQLMSPPRTDN

SEQ ID NO: 280831 - protein, 85 aa, Glycine max
  Clone ID: PAT_MRT3847_95612C.1.pep
VLLVCGSLGFRVSGFSGPWVWAGLCWALRWGWGWGVFILWRRRGPPVLCLCLVLSRPCFLNAPSVVLSLVFLNGRSRGSNGSSVR

SEQ ID NO: 280832 - protein, 65 aa, Glycine max
  Clone ID: PAT_MRT3847_95613C.1.pep
SLYQSSHKSYMHLLSGDVIPKTTLLFQGRVAPAYSTTPAMSLGSCLLQLDKRMACLLYGTCSDRH

SEQ ID NO: 280833 - protein, 128 aa, Glycine max
  unsure (1)..(128): unsure at all Xaa locations
  Clone ID: PAT_MRT3847_95614C.1.pep
VCSMISSPAVTTVNRAGACMVAPFTALKSMVGFPWRKTTIDITFVAINGGXVQCMLVSPPIANKKFETLSYSPYLNDAQLLYEVKYHLKTGWIPCSQFDTDHGLGYHDHNRAPGYYYGLYWTMWKLPM

SEQ ID NO: 280834 - protein, 155 aa, Glycine max
  Clone ID: PAT_MRT3847_95615C.1.pep
APERFFTPTIVTYNTVIEVFGKAGEIEKMDQHFLKMKHLGVKPNSITYCSLVSAYSKVGCIDKVDSIMRHVENSDVVLDTPFFNCIISAYGQAGNLKKMGELFLAMRERKCEPDNITFACMIQSYNTQGMTEAVQNLENMMISAKSSLGTKLIGC

SEQ ID NO: 280835 - protein, 64 aa, Glycine max
  Clone ID: PAT_MRT3847_95616C.1.pep
FNWFKLLKTFPPTPVYICYMFSSFGLIVQNITFPSLFIARAAKCLKFQVLIGKLLVFEHPHRLV

SEQ ID NO: 280836 - protein, 104 aa, Glycine max
  Clone ID: PAT_MRT3847_95617C.1.pep
CCFLKNMIFGWGALFTIGPFNCLPILGCLDLWVYSFPIVRIGLYLLNFVHLVFFFWICFFFGLWQTDWPNWMGSGSILFPGSGSYPLGFSLLWFSLFLVLFVFP

SEQ ID NO: 280837 - protein, 62 aa, Glycine max
  Clone ID: PAT_MRT3847_95618C.1.pep
SDLIGGLFGFFFFFLKILLLLNIRKCSRVNTFLGGPYYSLSKKENPWGDLGYNRSTFRGFNI

SEQ ID NO: 280838 - protein, 78 aa, Glycine max
  Clone ID: PAT_MRT3847_95619C.1.pep
SHTKTIFDLAFSLNPARTFQYHNHLSTTNSISPSSPILSNLTPHKTSLLPINPLLHYTNISPTTPTTTTSVVSQTRSL

SEQ ID NO: 280839 - protein, 117 aa, Glycine max
  Clone ID: PAT_MRT3847_9561C.1.pep
NMNLFVFFAVVVILVAWPCHVSGYQRFPLRMKTGYGERSSEVICACFTLAVEAHNIPAFKTIPEECFEPSKDYINGVQFRSYSKTGYQPAFFYASEPEVRDNDIFYSAYEDPHLFYI

SEQ ID NO: 280840 - protein, 56 aa, Glycine max
  Clone ID: PAT_MRT3847_95620C.1.pep
TSKLTYLHLLPCPGWKKSELTQEAQQVVALDDELDQGLTDIFFLSLSLSFEEKEKR

SEQ ID NO: 280841 - protein, 42 aa, Glycine max
  Clone ID: PAT_MRT3847_95621C.1.pep
LYIQLFTHFFNFKFKVFFESFSNLIPTNTSIPTLKSHFFNTY

SEQ ID NO: 280842 - protein, 46 aa, Glycine max
  Clone ID: PAT_MRT3847_95622C.1.pep
HGSRNRLPPLFPLSPSAFSHNICPASLLLSRYLGFPPRRPTLPYLL

SEQ ID NO: 280843 - protein, 120 aa, Glycine max
  Clone ID: PAT_MRT3847_95623C.1.pep
AGPLAGPGRDFWGVPRARSKPGYTSTQGGGLAGYEPNSPEEWKIRPDPVWWELSAWVGGLLSSGQGGGRPVAQSQGSMRMGSTDAHSLMVPGRRFIDHGHFTKNVTKEVRGQHGTSEKEL

SEQ ID NO: 280844 - protein, 472 aa, Glycine max
  Clone ID: PAT_MRT3847_95624C.1.pep
MSMASLPNSPALSFSSSLSTTANLLPCRRFTAFPRRRASSFSVQAKIREIFMPALSSTMTEGKIVSWIKSEGDMLSKGDSVVVVESDKADMDVETFYDGILAAIVVADGETAPVGAPIGLLADSPEEVAEAKAKAAKSVPSGSPAPASPSDPSPATPPPPPPPAKSVSEGPAKIVATPQAKKLAKQHKVDIATVAGTGPFGRITPADVEAAAGIAPSKRNVAPAAIPAPATPAPPSKAASGSAAPAPIPGSSVVPFTTMQSAVAKNMMESLSVPTFRVGYPVTTDALDALYEKVKPKGVTMTAILAKAAAMALVQHPVVNATCKDGKNFVYNGNINVAVAVAINGGLITPVLQDADKLDLYLLSQKWKELVEKARAKQLQPHEYNSGTFTLSNLGMFGVDRFDAILPPGHGAIMAVGASEPTVVAAKDGCIGMKNQMQVNVTADHRVIYGADLASFLQTLSQIIEDPKDLTF

SEQ ID NO: 280845 - protein, 63 aa, Glycine max
  Clone ID: PAT_MRT3847_95625C.1.pep
KKCFLFLSPQSLKIFLFYGMGGAPSLVKIKRMAIFFFRLVPRIPRLRSLIRALLSLFFSPPLR

SEQ ID NO: 280846 - protein, 41 aa, Glycine max
  Clone ID: PAT_MRT3847_95626C.1.pep
VGFLSGLATIASQIKSKRNHHNLLTAHVKITSEQKRSKGHT

SEQ ID NO: 280847 - protein, 68 aa, Glycine max
  Clone ID: PAT_MRT3847_95627C.1.pep
QKNHQILLYLYLLHTLKIGRLILTLTTHQFNINPYLLQKKKKSTQNKYILKYHPLSTNQSYFISISTS

SEQ ID NO: 280848 - protein, 100 aa, Glycine max
  Clone ID: PAT_MRT3847_95628C.1.pep
QIKFGVQIMDYSSLPHFCRREGSGSSRHSESGSENCYSLDHPFHQGLYNHIKQQARLREAVEPIKQGSFHVDFPVPPDDEVEIAKTIESELHKFENGNDV

SEQ ID NO: 280849 - protein, 47 aa, Glycine max
  Clone ID: PAT_MRT3847_95629C.1.pep
LQLFPRDHSLPHCLRLLGFTLFIYVLFDLRKKVREKKRRSVRNYYAS

SEQ ID NO: 280850 - protein, 56 aa, Glycine max
  Clone ID: PAT_MRT3847_9562C.1.pep
MDWEKTVVVHSSIKTPFFLQALTIRLEISHQILGPNLLCSIQWLQMRNLIIYKTRQ

SEQ ID NO: 280851 - protein, 30 aa, Glycine max
  Clone ID: PAT_MRT3847_95630C.1.pep
MLLQTDRKVDFMQHAGCFQRRAPTMTPQER

SEQ ID NO: 280852 - protein, 51 aa, Glycine max
  unsure (1)..(51): unsure at all Xaa locations
  Clone ID: PAT_MRT3847_95631C.1.pep
ILQSYIACPLLKLFNRNSIHNLTNSRQRYIXCIYTCKSLCTYPHTSATLDF

SEQ ID NO: 280853 - protein, 53 aa, Glycine max
  Clone ID: PAT_MRT3847_95632C.1.pep
SANKFQQTFITIPTTLHLFFHNYFGQDYNTSILITSTRNNKAGENHQYNLSLA

SEQ ID NO: 280854 - protein, 58 aa, Glycine max
  Clone ID: PAT_MRT3847_95633C.1.pep
KCNKPNKILNKNNSVLLALRVDMHYKIDLKRSNSFAPKRRERNIPLRPKPLQTGPLFF

SEQ ID NO: 280855 - protein, 146 aa, Glycine max
  unsure (1)..(146): unsure at all Xaa locations
  Clone ID: PAT_MRT3847_95634C.1.pep
QKYAAKIIEQVDMSSCKPSLTPVDSKPKLNANSSTPYAXDPSHYRSLAGTLQYFTFTRPDIACDVQQVCLFMHDPREEHMHALKRIVCYIQGTFDHGLHPYPSFTSTLLSYTDADWGGCLDTRRSTLGYCVFLGPPNGKLRCHELV

SEQ ID NO: 280856 - protein, 77 aa, Glycine max
  Clone ID: PAT_MRT3847_95635C.1.pep
RAAKMDMQFKYKSSNVTPQTTSNDSNSGVEDSEEEGNDLGVQSTNLDVHDFRFLDNIAPPSYYSPFEMAEEMAEQLW

SEQ ID NO: 280857 - protein, 79 aa, Glycine max
  Clone ID: PAT_MRT3847_95636C.1.pep
WIGLWAQKEGLALSYPLGFRHPKLIRPLLCLFLAKPHLCCPKAGFSRPVSQFLFFPSVARSEASCILVKDFLWLAATRQ

SEQ ID NO: 280858 - protein, 126 aa, Glycine max
  Clone ID: PAT_MRT3847_95637C.1.pep
GREPSKVSISLQILPQTPIFSTPVPPLTLELSFLLAEFFSFSFSHMARLTHFVLLFVLLFLSHELLGSEGRNLRQITIQSPDATKAMSIATKSANAIPSYRSIRSLSGDVEAFRPTTPGHSPGVGH

SEQ ID NO: 280859 - protein, 89 aa, Glycine max
  Clone ID: PAT_MRT3847_95638C.1.pep
RAPSGHYWEHHFPCSDLITANMMIHITGQKPKNATLTDTSYLNTCNPGEDITTDKCIQPTRDEFQIFVTIALPSAIQIFNSSDQGGLGI

SEQ ID NO: 280860 - protein, 36 aa, Glycine max
  Clone ID: PAT_MRT3847_95639C.1.pep
PTRSGSTCRHSHRPIANVKLQSYGDLKLMFNDQGQA

SEQ ID NO: 280861 - protein, 58 aa, Glycine max
  Clone ID: PAT_MRT3847_9563C.1.pep
YVDSERKYSNRKVDPRSPIPDRRVGALIQDVTSLTLLLSIYLRKKQKKFKSDPKSYIK

SEQ ID NO: 280862 - protein, 52 aa, Glycine max
  Clone ID: PAT_MRT3847_95640C.1.pep
NSKGNFWLPKILKKKPCISISLISSTELIHLCRVCHANNEPRNKSGRLGRTG

SEQ ID NO: 280863 - protein, 68 aa, Glycine max
  Clone ID: PAT_MRT3847_95641C.1.pep
WWGEKKTPSFMCHPVFYPLKYKEQLTCGKFKFIGSFFVKACFCCEQVLLCHNYGLFGIWKEHKNTKSS

SEQ ID NO: 280864 - protein, 92 aa, Glycine max
  Clone ID: PAT_MRT3847_95642C.1.pep
SARVDLALVKSFIASEVEKCIHIALLCVQQDEADRPTISTVVLMLGSDTIPLPKPNHPAFSVGRMTLNEASTSGSSKNLSINDVTVSTMLPR

SEQ ID NO: 280865 - protein, 57 aa, Glycine max
  Clone ID: PAT_MRT3847_95643C.1.pep
MASATLCVAKPELQANGKGFTEVSGLRSSSGYLPFTRKSSEDFHSVIGFQTYAVGSS

SEQ ID NO: 280866 - protein, 204 aa, Glycine max
  unsure (1)..(204): unsure at all Xaa locations
  Clone ID: PAT_MRT3847_95644C.1.pep
MTDDVMCSPNDKDLSLSPNLDITIDDGSPNNEQLLEVEDEGNELENECGQLFEIDGSEPENGRDETTIVDSHSGESQGKDCPPPVVRMEFDTYDDAYNYYNTYAKDIGFAIRVKSSWTKRNSKEKRGAVLCCNCEGFKTTKEANSHRKETRTGCLAMIRLRLVDSNRWRVDEVKLDHNHSFDPERAXNSKSHKKMDSRAKRKVE

SEQ ID NO: 280867 - protein, 75 aa, Glycine max
  Clone ID: PAT_MRT3847_95645C.1.pep
IDKQFLSTEFDHHDFGSVSLSQALWSSHSQMPLIPQVPQALSTTVIRAHVQGGASLICWVECHASMPCSVVCGWS

SEQ ID NO: 280868 - protein, 73 aa, Glycine max
  unsure (1)..(73): unsure at all Xaa locations
  Clone ID: PAT_MRT3847_95646C.1.pep
AVSSLRQYNDLRLHXYIKPSANLPILQSPIHHQPHFPSVSSLSNLTPIHTALFSRNPLFRYSMICPTTTTTTT

SEQ ID NO: 280869 - protein, 95 aa, Glycine max
  unsure (1)..(95): unsure at all Xaa locations
  Clone ID: PAT_MRT3847_95647C.1.pep
ASATLTSSWSLVISDVGVGSILDPHPIQIELKLFNRWNLEDIDDTHILLTHYIVVAAYMHASYALHTVXSYFVKRDRKAQFPIVVRLTNSLMLHG

SEQ ID NO: 280870 - protein, 39 aa, Glycine max
  Clone ID: PAT_MRT3847_95648C.1.pep
WGSDEASCDQGLCSVDGAGSRLVEHSVTLSLSLSLYKHD

SEQ ID NO: 280871 - protein, 49 aa, Glycine max
  Clone ID: PAT_MRT3847_95649C.1.pep
TLFMNTVYNYYKWETYIFRKKCILHPLSIAPFSTPSPHKNGREKRSVFI

SEQ ID NO: 280872 - protein, 111 aa, Glycine max
  unsure (1)..(111): unsure at all Xaa locations
  Clone ID: PAT_MRT3847_9564C.1.pep
QEYKGPTNKSYKRDCGLHNRDVHVTGGXKDGFIYFWDLVXHMMFXKFRVLTSVVTSVSYHPKEIGMVTCCGKASLKYGGYKNVMLTLTHIWCSPEPTAIAIRIGKTPWRGA

SEQ ID NO: 280873 - protein, 48 aa, Glycine max
  Clone ID: PAT_MRT3847_95650C.1.pep
PFLFFFFFFFFFFFFFFFFFFFLMKKECNCSYSFASYLHIFIMPNCYM

SEQ ID NO: 280874 - protein, 506 aa, Glycine max
  unsure (1)..(506): unsure at all Xaa locations
  Clone ID: PAT_MRT3847_95651C.1.pep
VPVYKAVKXGEFIITFPRAYHAGFSHGFNCGEAVNFAIGDWFPLGAVASRRYALLNRVPLLPHEELLFXEAMLLRTCLELEDSDFPSSDLFSHNSIKISFVNLMRFQHRARWFLTKSRAGISVSFHSHGTILCSLCKRDCYIAYVGCNCHKHHVCLRHDADSLDFNCGSKHTLYLREDIMDMEAAAKMFEQEDGILDEIRKQTKSDQNMYAYPLSNMFQGVEANGYTPYCELKLDSVVEFYATPEHSTNNQEYSSQNQSVVVRCSENKKPVVSEVSFSSATSTLCSLSESLESFSAPKNAEEHINNNASIIDFEEFAERISNSACESSLSPAVYHESSVKPLGDLQKRFDTKSIVDESDDSDSEIFRVKRPSSLKAERRNMNDAMSSKHTAQQGLKRLKKILPEGKSGQPMDFSRSNESSYKYGHPVNHKGHAEISSRDRFATGNGIPISIRCKKLGNEEISMQRDHNRRDRLQQTFREPPSMELEPKRLKVRGPSFLGLESSRSN

SEQ ID NO: 280875 - protein, 371 aa, Glycine max
  Clone ID: PAT_MRT3847_95652C.1.pep
MGSKVRTLVLLSLFCLALFVSLHQARAAKSHNNDNNHNVARLKGRKELNRCNLFIGSWVIDPSSHPLYDSSSCPFIDAEFDCQKYGRPDRQYLKYSWKPDSCALPRFDGVSFLNKWKGKKIMFVGDSLSLNMWESLSCMLHASVPNATTSFVRRQAISTVTFEDYGVTIQLYRTPYLVDIDREDVGRVLTLNSIKAGDAWTGMDMLIFNSWHWWTHKGDSQGWDYIRNGSNLVKDMDRLDAFFKGMTTWAGWVDQKVDSTKTKVFFQGISPTHYQGQEWNQPRKSCSGELEPSAGSTYPAGLPPAANIVNKVLKNMKNQVYLLDITLLSQLRKDAHPSVYGVDHTGNDCSHWCLPGLPDTWNELLYAALSM

SEQ ID NO: 280876 - protein, 109 aa, Glycine max
  Clone ID: PAT_MRT3847_95653C.1.pep
MAGLQRSEVSFRRQGSSGLVWDDKLLSGELNKNEDPKGAHGGDLNLNLNVRTTPPIQRSRSNGGYRTGKVSPAIEPPSPKLSACGFCSAFGKTGEKGRRAKPRAKHRSR

SEQ ID NO: 280877 - protein, 183 aa, Glycine max
  unsure (1)..(183): unsure at all Xaa locations
  Clone ID: PAT_MRT3847_95654C.1.pep
MGSKVKTLVLLSLFCLALFESLHQARAAKSHNNDNHNVTRLKGRKELNRCNLFIGSWVIDPSSHPLYDSSSCPFIDAEFDCQKYGRPDRQYLKYSWKPDSCALPRFDGVSLLNKWKGKKIMFVGDSLTLNMXESLSCMLHASVPNATTSFVRRQAISTVTFEVCYFSFCSLCLLSDLLHKNTS

SEQ ID NO: 280878 - protein, 103 aa, Glycine max
  Clone ID: PAT_MRT3847_95655C.1.pep
IARERGIPFLVEIVGYGSPRGKEKAAPLFLQISLQSFKFWPLVLQKGAVPPLGAFSISGPPRAKEKAPPLFPPFFYPRGAAFFGKGESLKYPILVFPLPLFFA

SEQ ID NO: 280879 - protein, 104 aa, Glycine max
  unsure (1)..(104): unsure at all Xaa locations
  Clone ID: PAT_MRT3847_95656C.1.pep
SFRPFGRMSHAAHHVTQPQETDLQEGNISFDLKSGSRLEEENSTKAQLDSGKTFKYDIXGAGSHSTEDFAVKEDQEKPKKIDARLRQRIDPEYNEDHAQMETKL

SEQ ID NO: 280880 - protein, 395 aa, Glycine max
  Clone ID: PAT_MRT3847_95657C.1.pep
MPEAPGDSTKDYVLEEKNKKILDFIEDVTNNADEVQKKVLSEILSRNANVEYLRRHGVNGQTVDPDTFKRLLPVITYEDIQPDINRIANGDKSPILTSKPVTEFLTSSGTSGGERKLMPTIEEELGRRCMLYSLLMPIMNQFVPDLEKGKGMYLMFIKCESKTPGGIVARPVLTSYYKSPYFRDRSYDPYTNYTSPNETVLCLDSYQSMYSQLLCGLCQHKEVLRVGAIFASGFIRAIRFLEKHWALLCNDIKTGTINNSITDSSVREAVMRILKADPKLADFIHNECSKGSWQGIITRLWPNTKYVDVIVTGTMAQYIPTLDYYSNGLPLVCTMYASSECYFGVNLNPLCKPSHVSYTLIPTMCYYEFLPVNRSNELAASRPFTTSLNQAQTAE

SEQ ID NO: 280881 - protein, 87 aa, Glycine max
  Clone ID: PAT_MRT3847_95658C.1.pep
ARALSSENEMEGIFRTAVSDERALADREHQENASANGEVRGVACFPERHLFHRKPLPFGMVCERGTIDMSLCGPTTHLTLRRMWVGY

SEQ ID NO: 280882 - protein, 83 aa, Glycine max
  unsure (1)..(83): unsure at all Xaa locations
  Clone ID: PAT_MRT3847_95659C.1.pep
XXXXTXTXSHXXXXXXXXNXXTXIHXLHXXXAXFTQLXTXNXPXXKLPXXXXNXTXQQXLHLXXXLXPXKXXEKKKXXNXXXL

SEQ ID NO: 280883 - protein, 57 aa, Glycine max
  Clone ID: PAT_MRT3847_9565C.1.pep
NFKHFDIYMDEKHILTYNLSLKKCYLGSDSSKPNSKPKNNTFQYHKDEKHNKNFAGL

SEQ ID NO: 280884 - protein, 67 aa, Glycine max
  Clone ID: PAT_MRT3847_95660C.1.pep
PLTLPLSFWRETFFGGGPLPVPLIEFPPAICPQPNGTSYITKCAPTKKNIPYSLKALLLLGTKTFLP

SEQ ID NO: 280885 - protein, 67 aa, Glycine max
  unsure (1)..(67): unsure at all Xaa locations
  Clone ID: PAT_MRT3847_95661C.1.pep
MEAKRGHALICLARVSLFLCALTLSATHRSTKDQHIAXHLXLGDNELLRTETQFKGFIEHYGRSYST

SEQ ID NO: 280886 - protein, 127 aa, Glycine max
  unsure (1)..(127): unsure at all Xaa locations
  Clone ID: PAT_MRT3847_95662C.1.pep
VPESPIPAHAPRVSGDCAAFLSNWAPKSCARGMLNSMHYNXPSWTIRSPPDRXNADGNTGEVGXHTCNMLVLPTDTCIFYWERLKEYSHLLRDRCGITRNTLGFXWDMINVSRDTSKYLWYTTRDDI

SEQ ID NO: 280887 - protein, 85 aa, Glycine max
  unsure (1)..(85): unsure at all Xaa locations
  Clone ID: PAT_MRT3847_95663C.1.pep
TNTKQNHIARDRPRQNRCSSAINARQRRAFSQTRTDTSIRKPHTHILHKPKSAYSSYTKLNNVAATLTLPRHAMQXHDESDQLLN

SEQ ID NO: 280888 - protein, 81 aa, Glycine max
  unsure (1)..(81): unsure at all Xaa locations
  Clone ID: PAT_MRT3847_95664C.1.pep
MPAVGKTYPADVGVXAAFFLNHVKLNPGEALFLGANEPHAYLSGECVECMATSDNVVRAGLTPKHRDVQTLCSMLTYKQVK

SEQ ID NO: 280889 - protein, 29 aa, Glycine max
  Clone ID: PAT_MRT3847_95665C.1.pep
LAPSLLHRCNSTRQICKHLRLKLCTTTHS

SEQ ID NO: 280890 - protein, 109 aa, Glycine max
  Clone ID: PAT_MRT3847_95666C.1.pep
PPGGLFSVQRLKGVNVNDKIPLPKVFGGGPDTSCSLGNPFVPNVVVSPPVEERGLPPKVIVFKKKKKNLFRRTFGPRPPKTGMGIKSLWGFETSPKVFRGDFKSGEPES

SEQ ID NO: 280891 - protein, 172 aa, Glycine max
  Clone ID: PAT_MRT3847_95667C.1.pep
TRPPLQTSLGFLKINDQGNLVIINQSQKPIWSSNQTTTTPSNLILQLFDSGNLGLKEPNENDPKKILWQSFDYPTDTLLPGMKLGWNFDTGIEKHITSWSATNEDPSSGDFSFKLDPRGLPEIFLWNKNQRIYRSGPWNGERFSGVPEMQPNTDSIKFTFFVGQHEAYYTFS

SEQ ID NO: 280892 - protein, 164 aa, Glycine max
  Clone ID: PAT_MRT3847_95668C.1.pep
PISTKGHYQHIMPGWKEATAVHQLSSNSYEAILHDDWCIGSVPNGGYVTGVLMEVVRTHFSTSLAKQNQPHTIALHVEFLRRTQAGPAYFNVEDVKLGRQTSIVHVSMEQDGRQEIVAYVTNSNIDKEEGFSFNTEYKLAPSLPDVDLKNSRPIPIPTGCDGGT

SEQ ID NO: 280893 - protein, 218 aa, Glycine max
  unsure (1)..(218): unsure at all Xaa locations
  Clone ID: PAT_MRT3847_95669C.1.pep
MDKNELVQKAKLAEQAERYDDMAACMKSVTEQGAELSNEERNLLSVAYKNVVGARRSSWRVVSSIEQKTEGAEKKQQMAREYREKIETELRDICNDVLSLLEKFLIPNASQPESKVFYLKMKGDYYRYLAEVAAGDDKKGIVDQSQQAYQEAFEISKKEMQPTHPIRLGLALNFSVFYYEILNSPEKACSLXKTAFDEAIAELDTLSEESYKDSTLIM

SEQ ID NO: 280894 - protein, 73 aa, Glycine max
  unsure (1)..(73): unsure at all Xaa locations
  Clone ID: PAT_MRT3847_9566C.1.pep
AGFDPYSMEWSGMGHTXLRLGSHGLRCDYTMFEELIAKHVMSLLSQMFNMSCGVRCSLDVDMTHHCASRKLQD

SEQ ID NO: 280895 - protein, 65 aa, Glycine max
  Clone ID: PAT_MRT3847_95670C.1.pep
SVLLNLAEGFNGADLRNVCTEAGMSAIRAERDYVIHEDFMKAVRKLNEAKKLESSAHYSTDFGKE

SEQ ID NO: 280896 - protein, 229 aa, Glycine max
  unsure (1)..(229): unsure at all Xaa locations
  Clone ID: PAT_MRT3847_95671C.1.pep
MSGLEELRKKLAPLFDAEKGFSSSSTLDPCDSYTFSDGGTVNLLSRSYGVYNINELGLQKCTSRSVDETDHSEKTYKCCSHEMRIFGAIGSGASSVVQRAIHIPTHRILALKKINIFEKEKRQQLLTEIRTLCEAPCYEGLVEFHGAFYTPDSGQISIALEYMDGGSLADILRMHRRIPEPILSSMFQKLLHGLSYLHGVRHLVHRDIKPANLLVNLKXGEPKITDFWY

SEQ ID NO: 280897 - protein, 34 aa, Glycine max
  Clone ID: PAT_MRT3847_95672C.1.pep
KAIVKLRCTMRVVDYKPCDCSPLHIKCWVCLNVK

SEQ ID NO: 280898 - protein, 54 aa, Glycine max
  Clone ID: PAT_MRT3847_95673C.1.pep
RPFFFFFFKQNKYTLRNVLYGNDYMMLNLDAMMCTQMSESHLYTYKRYNHKALF

SEQ ID NO: 280899 - protein, 44 aa, Glycine max
  Clone ID: PAT_MRT3847_95674C.1.pep
YFSSWESLQKGLGMPPVSPTITPIYIPKFKNKLTQNIELVDVLF

SEQ ID NO: 280900 - protein, 45 aa, Glycine max
  Clone ID: PAT_MRT3847_95675C.1.pep
KGKITTFAGRIELSLIFSNLVCAEYIINRLDDVRPLGTQLNMCLL

SEQ ID NO: 280901 - protein, 131 aa, Glycine max
  Clone ID: PAT_MRT3847_95676C.1.pep
KGTIKNPKNIKEKLYMSPRGKKNPIKQADFWNKKNPAPNQTKKPKKTVNFQNLGKRAQRPEDPNHIKIQGAKFRKPPPPVIKRTNLTSLDPPTAPVNNNPNPEGQPNRTKTRGGYPRQRKTKRRLALTPLI

SEQ ID NO: 280902 - protein, 165 aa, Glycine max
  Clone ID: PAT_MRT3847_95677C.1.pep
ATEAMLQLGILILTLSLFFIMHNIHTQTTQARTRTRNKTSQSEPNRHLAQASRHLARARSTSHRAQHAKNALAEADKALAVWPRDPRAHILRAQALHLTGQRAAAIKALDAALSSAAARSLSAAERVRALVERAELKVAMNQRRRVDSAVKDLVEAVGLSGGSDL

SEQ ID NO: 280903 - protein, 61 aa, Glycine max
  unsure (1)..(61): unsure at all Xaa locations
  Clone ID: PAT_MRT3847_95678C.1.pep
ARCHRRDIXCTRASDLELELWRNDRLLMVRRPLIITHRRGGELRYLHLGEGQISHSLFHTH

SEQ ID NO: 280904 - protein, 160 aa, Glycine max
  Clone ID: PAT_MRT3847_95679C.1.pep
MENNKMMGVKKEDYAANIGSSSLPSCNNYPFFDFSEDKGSLGFMELLGVQDYNHLLDFPLSSHVSVPQTSAVKEPPETKKECSEVTNNNQQPATPNSSSISSASSEVFYDEQNKTVDQAPEHQKTKEQLKAKKTNQKRQREPRFAFMTKSEVDHLEDGYR

SEQ ID NO: 280905 - protein, 50 aa, Glycine max
  Clone ID: PAT_MRT3847_9567C.1.pep
QVVIMSAYSIKFLIRCSSWFIFHTCFEVIRCQFLLLGYTYVMCTRDINLV

SEQ ID NO: 280906 - protein, 141 aa, Glycine max
  Clone ID: PAT_MRT3847_95680C.1.pep
GTTTSKYDTTTSKYGTTTPEYDTTTSKYDTTTSKYDTTTSDYGTTTSKYDTTTSKYDTTTSKYDTTTSKYGTTTQKYRGKRFADAVLVRAARAEYDAYCPAGPPGDAGIAGPPGPPGEPGKCYGSGSKESKEKEYKPSKRS

SEQ ID NO: 280907 - protein, 89 aa, Glycine max
  unsure (1)..(89): unsure at all Xaa locations
  Clone ID: PAT_MRT3847_95681C.1.pep
IPFSLXNFLTXAFXDASLSSXXSXXKDIXXWXWKXXTPXDKVXGXIQGKGRDSPRNXKGLIFAXKQLXTGXTXXTXTSEGDTLNCLRFV

SEQ ID NO: 280908 - protein, 65 aa, Glycine max
  Clone ID: PAT_MRT3847_95682C.1.pep
RKLGIRLEVTFLRLHRGHRKIACSISPRQISSSGVSTALSTPQAHSGLFRISYMLVVDRYSTKGL

SEQ ID NO: 280909 - protein, 127 aa, Glycine max
  unsure (1)..(127): unsure at all Xaa locations
  Clone ID: PAT_MRT3847_95683C.1.pep
RTNPMTIFWRSMGLSYTHRLLNGMLTVPVATLNWNYVRNDQPRFETTYHIASCIKDEVEDFEKAGITVIQTDEPAWREGLPLKKSQQAHYLYCSVHAXLIINVGIQGTNNNHTHMCYSDFSDIMHSI

SEQ ID NO: 280910 - protein, 91 aa, Glycine max
  Clone ID: PAT_MRT3847_95684C.1.pep
PMESNNMPDLNGVTKKTKGRQKVHTHLHYLSNQIAIEKKRSKDLNHLAKVAEDQFWWARPIESMTNSQLDKYKKMLEEFKRQLKEKRGNLN

SEQ ID NO: 280911 - protein, 66 aa, Glycine max
  Clone ID: PAT_MRT3847_95685C.1.pep
PRVRPRVRSYEFNDTTCKIGRIDNELRRLHDGRSTTDNNHIGSCATRCQIHADQKGMLLKRPRLCS

SEQ ID NO: 280912 - protein, 110 aa, Glycine max
  unsure (1)..(110): unsure at all Xaa locations
  Clone ID: PAT_MRT3847_95686C.1.pep
WGFFVSGPPPLRGWWEPRLICSGPPGLAALLGDSPCSDRFVCPGALGRFGLGGGFLLSHFCPVLPQGVLLGAVLPSCSPWLGSCGSFGFWVLGVLRFFVLPVPLFVXFFV

SEQ ID NO: 280913 - protein, 122 aa, Glycine max
  unsure (1)..(122): unsure at all Xaa locations
  Clone ID: PAT_MRT3847_95687C.1.pep
ISLDSSFLCSLSSLTHLGPWLLCFCTRVLGGTFRVAESGSFSGKDDQYPPPRPLTEADEXTKWALLQAPIAEFIALLXFLDITVPTVIGYKHQPGHADACGGVGILGIAWAFGGMIFILVYC

SEQ ID NO: 280914 - protein, 53 aa, Glycine max
  Clone ID: PAT_MRT3847_95688C.1.pep
YILCVVCTCIFKEMTFREKRTAFQTSVPQIRGDSAIWLPFNLLTYSVIKYLQN

SEQ ID NO: 280915 - protein, 36 aa, Glycine max
  Clone ID: PAT_MRT3847_95689C.1.pep
DDVIVKFIQRRLNDTTTALFISLIMLCSIDAANALR

SEQ ID NO: 280916 - protein, 147 aa, Glycine max
  unsure (1)..(147): unsure at all Xaa locations
  Clone ID: PAT_MRT3847_9568C.1.pep
GVPKQKWGVPLRRGEPGVKKSVRXAENRNICEVYSGDVACSDGSCSSSDEQGEVSENVSGAVEDNGVDSSQGAEDHEEVLVFDSGGLPHSSDDGERNTRRLFVKVGRNVVKEQLQAHQEKLLFSAPLPLKMENRSGSKNSKGVKILT

SEQ ID NO: 280917 - protein, 38 aa, Glycine max
  Clone ID: PAT_MRT3847_95690C.1.pep
IYMPLLAQMLITDSISIVTQYTGVFSCHLIFPAIQLDY

SEQ ID NO: 280918 - protein, 234 aa, Glycine max
  unsure (1)..(234): unsure at all Xaa locations
  Clone ID: PAT_MRT3847_95691C.1.pep
NSRRPTRPLWFALAVATNSCAWLSTAILVTNMRNFPVSRGTVAGILKGYSGLSAAVFTQIYSVVFHNSSSXFLLFLAIGIPVLCFSTMFLVRPCTPASGDDSAEKGHFLFIQGASVAMGLYILATTLLDNFIHIRDSVSYALLAVMILLLLAPLVIPIKMTLCPRKASSTEIPEEHVGSTDYLVQDGKDNVEPLLSSSSPSGLGSFNDVVDGSAEVAMLLAEGEGAVRKKRRPK

SEQ ID NO: 280919 - protein, 165 aa, Glycine max
  unsure (1)..(165): unsure at all Xaa locations
  Clone ID: PAT_MRT3847_95692C.1.pep
MEKTKERIGIRKGLGIGRECRRDKGKGGKNXRKRGKNEADDEKRELVFKEDGQEYAQVLRMLGNGRCEAMCIDGTKRLCHIRGKMHKKVWIAAGDIILVGLRDYQDDKADVILKYMPDEARLLKAYGELPDSTRLNEGIGAGLDEEEDGTGNDYIEFEDEDIDKI

SEQ ID NO: 280920 - protein, 188 aa, Glycine max
  unsure (1)..(188): unsure at all Xaa locations
  Clone ID: PAT_MRT3847_95693C.1.pep
CIQYLMQICEIRGFQSMLGSIDYLHWKXKTCLVAWKGQYCHGDGPPTIMLKVVVSQYLRIXHAYLGVEGSNNNINVLNESXFKDVMEGEAPIVQFAVNEIQYNMGYFLTYGIYLDWTTLVKTILRPXGHKRKLFTQYQEATRKDXFEVLQSXFAIIRGLVCGWXHEHISSIYYMYVCIILHNMIVKDE

SEQ ID NO: 280921 - protein, 46 aa, Glycine max
  Clone ID: PAT_MRT3847_95694C.1.pep
MVFSMISSPAVTTLNRAGARMVAPFTGLKYMAGLLTKKTNNDITSI

SEQ ID NO: 280922 - protein, 106 aa, Glycine max
  unsure (1)..(106): unsure at all Xaa locations
  Clone ID: PAT_MRT3847_95695C.1.pep
XXXXXXXXXXXXXXXXXXXXXXXXXXXXXXXXXXXXNXXXXXFXSYXLSXXFXYXTXXXXXLXXKXNISXSXPFLFXFXKRXXXHXXXEDXKTNSXXIPXXXTXXL

SEQ ID NO: 280923 - protein, 35 aa, Glycine max
  Clone ID: PAT_MRT3847_95696C.1.pep
YGLDDHIDLYIHKPVDYLFVWFLFMLGPCMYSQAF

SEQ ID NO: 280924 - protein, 268 aa, Glycine max
  Clone ID: PAT_MRT3847_95697C.1.pep
GKPLKAKHPSFFLLNFVSFINRLKVLSALDTARTQYYHFKAIIIAGMGLFTDAYDLFSITLIIKIIGRVYYGHREGENRYETPPEVVSALVAVALLGTAVGQLVFGRLGDLKGRRRVYGFALLLMVFSSLASGFSICIRKTCVLLTLGFFRFFLGLGIGGDYPLSSTIMSEFANKKTRGSFIAAVFSMQGFGILASSTVTMAVCSIFGAASKNSEADVAWRLILMLGSVPAAMTYYWRMMMPETARYLLPFTFSLYNFIFSFNLFIIQ

SEQ ID NO: 280925 - protein, 91 aa, Glycine max
  unsure (1)..(91): unsure at all Xaa locations
  Clone ID: PAT_MRT3847_95698C.1.pep
MQHTAAMALSSPSLAGNAFTLGPSSPHLRTVSITKTFPIQGSSGIPSSSPYRIKYLDSFSGEPPSYPTRQYLRYXRRDTAGLSAYPHIFAN

SEQ ID NO: 280926 - protein, 65 aa, Glycine max
  Clone ID: PAT_MRT3847_95699C.1.pep
HKFLFIIASITLKPVHFTVDKSSLIRLPYLSMNSSSFIVVSNPYNNIKTDKPYVINLTIAFMQRL

SEQ ID NO: 280927 - protein, 48 aa, Glycine max
  Clone ID: PAT_MRT3847_9569C.1.pep
VAPSTPTYSTDRRPHTASLSSSLVSPHCFQHHFHQPYSFPPPPPPPDA

SEQ ID NO: 280928 - protein, 88 aa, Glycine max
  unsure (1)..(88): unsure at all Xaa locations
  Clone ID: PAT_MRT3847_956C.1.pep
MAASLQAAATFLQPTILSRSNTLQQKSTQSISKAFGLEPVGAXSKVTCSLHSDLKDLAHKCVDATKIAGIALATSALVVSGASAEVFP

SEQ ID NO: 280929 - protein, 209 aa, Glycine max
  unsure (1)..(209): unsure at all Xaa locations
  Clone ID: PAT_MRT3847_95700C.1.pep
MKTAGFKAALAEEEILEKIESGIRENNVDRSYANKLLLDITDAVGIGNERSTIKIELEEFKSEIENARVRKDLAEAMQMDQIIALLERADAASSTKDKELKYFAKRQSLGTQIMEPLQSFYCPITQDVMVDPVEISSGQTFERSAIEKWFAEGNKLCPLTLIPLDTSIXRPNXKLKQSIQEWKDRNIMITIATLKEKILSGNDEKVLHD

SEQ ID NO: 280930 - protein, 116 aa, Glycine max
  Clone ID: PAT_MRT3847_95701C.1.pep
LTLQSNVTSRRRSSSNLSLKIMDSVVRPLHDILFLSVDHVLCLAFKTLISFFVSSVHAYPMLPGLYGFKPIKWFTACMNRVIVCSTINLILTPYNHQTSFLTNRILLVNLSCCRSL

SEQ ID NO: 280931 - protein, 30 aa, Glycine max
  Clone ID: PAT_MRT3847_95702C.1.pep
SPNVDLFLFQVSRVVICGSDNERSDLRSLA

SEQ ID NO: 280932 - protein, 51 aa, Glycine max
  Clone ID: PAT_MRT3847_95703C.1.pep
MYNLNKLHSTNILTFDLGPPFHTSLQTPISSQTSFDSKQNSQSFQLTSIYI

SEQ ID NO: 280933 - protein, 147 aa, Glycine max
  Clone ID: PAT_MRT3847_95704C.1.pep
VVALYSINRLWLLPHKNRYLASHWCVECTLDAFTASFSSYSVTDQVPLGWEKISSLCEIIFSASGVGAFLRCPFNQHIHSTRGNKPLKLCMNHSNPFESHHHPKASFHDEQIMQHHRPCSALDEIQNIDGTSKVPSEVLLRLTRKKL

SEQ ID NO: 280934 - protein, 90 aa, Glycine max
  unsure (1)..(90): unsure at all Xaa locations
  Clone ID: PAT_MRT3847_95705C.1.pep
YGTVPVVHAVGGLRDTVQPFDPFNESGLGWTFDSADXGKLSHALGNCLWTYREYKKSWEGLXRRGMTQDLSWDNAAQQYEEVLLAAKYQW

SEQ ID NO: 280935 - protein, 127 aa, Glycine max
  Clone ID: PAT_MRT3847_95706C.1.pep
DAWAKQVGSYKAKERLWKTRAVDSVLQEHSGYLQSIQRSLTATNNSPWKRNDLFLPNERIWSTPRPSQIRTHSQYSDPFPHQERLRRQPTEAEIRPDAVLATLDWEPFERAWTSPLPAHVTTAIARD

SEQ ID NO: 280936 - protein, 77 aa, Glycine max
  Clone ID: PAT_MRT3847_95707C.1.pep
KQNIGRQTKGLDLHLDPEQPNKLFRECQIPRLFHNYSFNHQNLSFTGSHLILRQHLQSSPFILYILDIIRLGFRFVI

SEQ ID NO: 280937 - protein, 51 aa, Glycine max
  Clone ID: PAT_MRT3847_95708C.1.pep
INYKLNKIINHLKTLIKNYVVLLYVDSRGVVEVEDVFKEEKKVHCCEEFEN

SEQ ID NO: 280938 - protein, 51 aa, Glycine max
  unsure (1)..(51): unsure at all Xaa locations
  Clone ID: PAT_MRT3847_95709C.1.pep
LCTNSLTMSVNTNLRTDAWSVXLLKRSRYQCAFICVTGLTGTSMQDVHGST

SEQ ID NO: 280939 - protein, 91 aa, Glycine max
  Clone ID: PAT_MRT3847_9570C.1.pep
ESLLTITSSIVNIPSPQPSMFSIDHFRDLAWHPHWSQVLGHDNSQVLDLLDTWFLLPSQQLVPPLGVGAYRFSFLFPPSFYQPRMSYHSSC

SEQ ID NO: 280940 - protein, 85 aa, Glycine max
  unsure (1)..(85): unsure at all Xaa locations
  Clone ID: PAT_MRT3847_95710C.1.pep
EEEERRRKSKPRRFCDQFCGRSSFVLHHSSIFNRLVFYFEALNSFYAPLGVHSCFVCYHLHSSTVXILFFHXKQVSTERLSPYLT

SEQ ID NO: 280941 - protein, 54 aa, Glycine max
  Clone ID: PAT_MRT3847_95711C.1.pep
SDQLSEPLSFKHIHSTIKACSNPSFIRSLISATSPDFVEDRALHLMHHADRLIP

SEQ ID NO: 280942 - protein, 46 aa, Glycine max
  Clone ID: PAT_MRT3847_95712C.1.pep
PGFSPMWGTLTLITTHLILALGMLLILRHTLIHDESILFPLYSFSI

SEQ ID NO: 280943 - protein, 53 aa, Glycine max
  Clone ID: PAT_MRT3847_95713C.1.pep
GKNSFNSLNLILLFLCHPPAKALSCFIAVAHVVDVMSLDCCNGAVYVGRGLCS

SEQ ID NO: 280944 - protein, 58 aa, Glycine max
  Clone ID: PAT_MRT3847_95714C.1.pep
PKFGTSFSLRKAKPPSGPKPIAGPFPPSNLKFGPLGPSNARTRLLISTKSYPNNPFGS

SEQ ID NO: 280945 - protein, 45 aa, Glycine max
  Clone ID: PAT_MRT3847_95715C.1.pep
KSVKKSFIQNIKHNLHIWVFWSLNKLMNIDYPLSLPIQTIHIGIC

SEQ ID NO: 280946 - protein, 94 aa, Glycine max
  Clone ID: PAT_MRT3847_95716C.1.pep
QACGLSCQIAQGKSLSSHHLRNHFSLVMDQGLAYDALLASSSTATWVPDWTSNWGSHKFTKMAPASIGKAFLAFVPFASCSLISGYTVNSRSSM

SEQ ID NO: 280947 - protein, 51 aa, Glycine max
  Clone ID: PAT_MRT3847_95717C.1.pep
TYFLFDQNFNLTFSTYLFNNILEYLINTKILLPCAYPITFIIHLLQFFNYK

SEQ ID NO: 280948 - protein, 31 aa, Glycine max
  Clone ID: PAT_MRT3847_95718C.1.pep
CKIHNCDLRMGAFTLGVNRVARSTLLRGWEA

SEQ ID NO: 280949 - protein, 68 aa, Glycine max
  unsure (1)..(68): unsure at all Xaa locations
  Clone ID: PAT_MRT3847_95719C.1.pep
TQHTXTTLRNYMASPAREAYLGLIQPCTCICILIQNTENRTRDVFTPFPKRKVFSSKKDFFIVNHKST

SEQ ID NO: 280950 - protein, 68 aa, Glycine max
  Clone ID: PAT_MRT3847_9571C.1.pep
FKDSFICRSLSKKNAFQNKKKWPGEPLFPYKKKCLGPPQRFGGPTQEKAFYKRLGPPHPKYGVFLPQN

SEQ ID NO: 280951 - protein, 65 aa, Glycine max
  Clone ID: PAT_MRT3847_95720C.1.pep
LLSIIKFATDPLSQPKNNQHEKFPTGTYLTPTRGGHFKQTRTQTITNKSAPAQTQTKAVGPPSHL

SEQ ID NO: 280952 - protein, 107 aa, Glycine max
  unsure (1)..(107): unsure at all Xaa locations
  Clone ID: PAT_MRT3847_95721C.1.pep
MDIMMDNSPRARSFLRGECSRGDEGLNGLGAGRLGVTSLAPLCCLPAAWSIXGCHDNGCVXRIITDAQGSNKMLNSAAASIQKQLPGVKIAILDIYKPFYDLVQAHC

SEQ ID NO: 280953 - protein, 174 aa, Glycine max
  Clone ID: PAT_MRT3847_95722C.1.pep
GPSLCSSTSSRNQRPIPIPHFWSEVKCMYCLQYQVMFAVNFEFCLSVNHCPSADLIKQIMVCRRRGILRLGILRRDGRLGQQLRGVVVVVAAEEVKGVRGRHRCEFDGLQKKSRYKLAIFVCGVGDWGTDPSWLRGSPAGLHRHGSPAAKIEGVGKARVGDGAHASANAWRTRV

SEQ ID NO: 280954 - protein, 46 aa, Glycine max
  Clone ID: PAT_MRT3847_95723C.1.pep
FVFCWWTRVNSLFSGIKKGLVVGKYYLFVECPNSICFIWDVVFLFE

SEQ ID NO: 280955 - protein, 79 aa, Glycine max
  Clone ID: PAT_MRT3847_95724C.1.pep
TMTSSEFYLFHFTPKGTFYGLFFISFYIFVVPRQVEKKFFLKELGWVKKHNPSRRKQKGGGKAVLSYLLAQTFPKNMVW

SEQ ID NO: 280956 - protein, 68 aa, Glycine max
  unsure (1)..(68): unsure at all Xaa locations
  Clone ID: PAT_MRT3847_95725C.1.pep
SACKCCNSCRGCKMYPDLSYTESTTTXTFVMGVAPVKAQFXSAEMCVPSDNYGFKCXLTAPCNSCTCN

SEQ ID NO: 280957 - protein, 148 aa, Glycine max
  Clone ID: PAT_MRT3847_95726C.1.pep
MRVKEMHPLCCISLESPGIGKHSPEREPAALFRTSSLPAAGSHGNAAQGSETTVAGVLYKWTNYGKGWRSRWFLLRNGVLSYAKIRCPENLNLLIPSDDVRLIGEISTNRLARVDGAATVTRRKHRKTSSSSSGVVHLKVTNSIYTHA

SEQ ID NO: 280958 - protein, 70 aa, Glycine max
  Clone ID: PAT_MRT3847_95727C.1.pep
EIKGVLFLKEIVISDYKMDIYKLINIYGGVVFVRNFLRLLKILDVVMSEVLFVCEMFSVDLKEVLEIVEM

SEQ ID NO: 280959 - protein, 69 aa, Glycine max
  Clone ID: PAT_MRT3847_95728C.1.pep
AILHSHHEYISSILCNQPLAIFSNWLLHGHSCSSSAVLAPSYIIFLQAPRVVSWSVHFWPASIVRESSP

SEQ ID NO: 280960 - protein, 246 aa, Glycine max
  Clone ID: PAT_MRT3847_95729C.1.pep
MRKSAADRFRHLFNRSLILLRHRHHHHPFPSSSSLSPFSRSRFFSSTPFSMASDSPFPVTAQNINPKVLKCEYAVRGEVVTLAQNLQKDLQANPGSHPFDEILYCNIGNPQSLGQQPITFFREVLALCDHPAILDKSETQGLFSTDAIQRAWQIVDQIPGRATGAYSHSQGVKGLRDTIAAGIEERDGFPANPDDIFMTDGASPAVHNMMQLLIGSENDGILCPIPQYPLYSASIDLHGGFLVPYY

SEQ ID NO: 280961 - protein, 26 aa, Glycine max
  unsure (1)..(26): unsure at all Xaa locations
  Clone ID: PAT_MRT3847_9572C.1.pep
CTPAHDNSFSMPPMINILVYHKKKXX

SEQ ID NO: 280962 - protein, 572 aa, Glycine max
  unsure (1)..(572): unsure at all Xaa locations
  Clone ID: PAT_MRT3847_95730C.1.pep
CFLHTVPFNLSLHSSAPPSPSSSLSFFFFSLPIYSLAHVFRHLFNRSLLLLRHRHHHNHHPFPYSSSVSSLSPFSRSRFLSSTPFSMASDSPFPVTAQNINPKVLKCEYAVRGEVVTLAQNLQKDLQANPGSHPFDEILYCNIGNPQSLGQQPITFFREVLALCDHPAILDKSETQGLFSTDAIQRAWQIVDQIPGRATGAYSHSQGVKGLRDTIAAGIEERDGFPANPDDIFMTDGASPAVHNMMQLLIRSENDGILCPIPQYPLYSASIALHGGCLVPYYLDEATGWGLEIPELKKQLEAAKSKGINVRALVVINPGNPTGQVLGEANQRDIVEFCKQEGLVLLADEVYQENVYVPEKKFHSFKKVSRSMGYGENDITLVSFQSVSKGYHGECGKRGGYMEVTGFSAEVREQIYKVASVNLCSNISGQILASLVMSPPKVGDESYDSFMAEKENILXSLARRAKTLEDAFNKLEGVTCNKAEGAMYLFPQIRLSEKAIKAAEAANATPDNFYCKRLLNATGVVVVPGSGFGQVPGTWHFRCTILPPEEKIPAIVTRLTEFHEKFMDEFRD

SEQ ID NO: 280963 - protein, 34 aa, Glycine max
  Clone ID: PAT_MRT3847_95731C.1.pep
GWITTLFELNRLLTTNCIAQPHSLYYALNYQSCI

SEQ ID NO: 280964 - protein, 66 aa, Glycine max
  Clone ID: PAT_MRT3847_95732C.1.pep
ILQSNTHIFLQFLNHTNSKLSSHHKNIFKVHNHISIAIDDLTYYNHHLSHYMISECINYNYTYYFP

SEQ ID NO: 280965 - protein, 515 aa, Glycine max
  Clone ID: PAT_MRT3847_95733C.1.pep
SRADSARVTLEVGGDQIYSSRQQGTQNDAQSKKHDSSRSSGFPGTKGPSDEMWDVMEPSVEQGQVAKETDISKETGKAVVTRTGRSLWGMIGDIVQLRWGSRAGSSTSAGRSAERNSPNKSDSDTWFSGQEHEETTKTNVLKKTSVPPQVMTSDKLKPGKHYTQSEGEVSDNTKLKDRGKNVEVGLSSPNTLESGSMLVGASHTSGEENASWTEDKKNLKVNTSGTQNMELPISVPARGPSIVGEIISIGGSDMSGAESVVPIKESVAPGQSELSGSERKDGELKQRKFQRNRQVLREDDRRGEEAYQRELEQRRVDEMFMKEALLEAKKAADTWEVPVGAVLVQHGKIIARGCNLVEELRDSTAHAEMICIREASNLLRSWRLSDTTLYVTLEPCPMCAGAILQARVDTVVWGAPNKLLGADGSWIRIFPDGGENVSEQRDIPPAPVHPFHPNMKIRRGVLATECADAMQQFFQLRRKKKKEEPPNGPSSLPVTHHPSKLLNKIHDVFHIMFCL

SEQ ID NO: 280966 - protein, 240 aa, Glycine max
  Clone ID: PAT_MRT3847_95734C.1.pep
MSNSDGAINAVPPNDANNNTIVEYQQRTTTTTTAAAAALAVKKPPSKDRHSKVDGRGRRIRMPIICAARVFQLTRELGHKSDGQTIEWLLRQAEPSIIAATGSGTTPASFSTVSDHKPLLPPPTPFILGKRIRPDDDSAAKDDAVSLVAPPTPPALWALPPRPDFGQVWSFAAAPELVSVSPQNSMFHHHHQHHQQQQQQAAMGEASAARLGNYLPGHLNLLASLSGGHGNSGRRDDEPR

SEQ ID NO: 280967 - protein, 29 aa, Glycine max
  Clone ID: PAT_MRT3847_95735C.1.pep
SLYSILHLKDRKFLTNLYYLITWRGGNTD

SEQ ID NO: 280968 - protein, 80 aa, Glycine max
  Clone ID: PAT_MRT3847_95736C.1.pep
TGKFRISSIQKVIKAVIISHTYLLFLPLRVVKNLQLSSTSTRIRIIPCPKLITPSFLFSPTIYTASQKTEKKPIPFICFW

SEQ ID NO: 280969 - protein, 60 aa, Glycine max
  unsure (1)..(60): unsure at all Xaa locations
  Clone ID: PAT_MRT3847_95737C.1.pep
MDLGVSDEILGTFVPLVVYWIYSGIYVVLGLFAENYRLHXSKQEEDEKNLVXKGAVVKGC

SEQ ID NO: 280970 - protein, 261 aa, Glycine max
  unsure (1)..(261): unsure at all Xaa locations
  Clone ID: PAT_MRT3847_95738C.1.pep
TTKTTSYWIHLPPHRETPRNSNTRHEKMHSDQKLKXDEETQDRAGVKEDLDEIKETLTRQFWGMASFLAPPPSDSHSPSDPSSFVSDQSNHRAVSPNEVPQLDDAAISNHSNSVSVGSDSDGDCGLAQRAVGITEEVLVFAMNIAMHPETWLDFPIDEEDDTDDFDMSGAQQEHCXVVERLTPRLAALRIELCPCHMSESYFWKVYFGLLHSRLNKEDAGILSTPQVMAARAMCMQELHKQTKPEFEDAGNGVTLNRDNAL

SEQ ID NO: 280971 - protein, 150 aa, Glycine max
  Clone ID: PAT_MRT3847_95739C.1.pep
CRIFFTSSQKPERNPNPEKIDIPSRDFRNQSNRIVIKRSRMRIRRIRIKRRKALSNQKSEEVAATVRAKQCNPIESKKRNNRICSFGENLDDGALGIGANLFDRRRRRKSFKRESRGTPPPCGGGGSSGESETIRMNGDADRRSLVEKRR

SEQ ID NO: 280972 - protein, 48 aa, Glycine max
  unsure (1)..(48): unsure at all Xaa locations
  Clone ID: PAT_MRT3847_9573C.1.pep
SLPGSNKLKLYPYPFNFRQKTIPIPIFHLLXTPTRAKGFPLXDIGRRG

SEQ ID NO: 280973 - protein, 57 aa, Glycine max
  Clone ID: PAT_MRT3847_95740C.1.pep
ATILYLDYIPMGKEQQQAGKQQLFVVGEMFSLVLKALRKVFVVTKSREDQLGVSVVV

SEQ ID NO: 280974 - protein, 57 aa, Glycine max
  Clone ID: PAT_MRT3847_95741C.1.pep
TGNIDSFQVLVRGKDCVFVFGLLIVVDEGGGGGLIFTMETCLFRKVDSGVVGLFWCG

SEQ ID NO: 280975 - protein, 72 aa, Glycine max
  Clone ID: PAT_MRT3847_95742C.1.pep
FLVFSFSFSKRSSYIIFNYHFPSPIKKRKRNTGQSDGEIKVIGYIFCKPSPIPDKACYFVELHYSFLQLALR

SEQ ID NO: 280976 - protein, 134 aa, Glycine max
  unsure (1)..(134): unsure at all Xaa locations
  Clone ID: PAT_MRT3847_95743C.1.pep
ARVLTTGVIACVNKTKLVAGDAAMLLRGNHGELRLGIRWAAHLXKSWFVXGPSGQELNTATLKGVGNALSTRGAFSVRYNHRMSSAQVIIPVHRFLKSLDCSYSAGMRFMTHVETEDSXEPRCTGLIAGISDVD

SEQ ID NO: 280977 - protein, 44 aa, Glycine max
  Clone ID: PAT_MRT3847_95744C.1.pep
QMLPTQFQPLVIRFVMHYPWSQTWSCIQPSISGVYRKSKLSSSL

SEQ ID NO: 280978 - protein, 76 aa, Glycine max
  unsure (1)..(76): unsure at all Xaa locations
  Clone ID: PAT_MRT3847_95745C.1.pep
RHLFSFRNVAKPYELRSNDFFDLWNVAESLRIAQQCFLSTSDMPXNLTNYLTMGVKYFKAIKRRLHPTKQMVPGRN

SEQ ID NO: 280979 - protein, 179 aa, Glycine max
  unsure (1)..(179): unsure at all Xaa locations
  Clone ID: PAT_MRT3847_95746C.1.pep
ALIVNWRAXLKIGPNEPCELAIHENAYGLARYAVICQENGLVPIVEPEILVDGPHDINKCAEVTERVLAACYKALNDHHVLLEGTLLKPNMVTPGSESKKVTPEVIAQYTVTALQRTVPAAVPAIVFLSGGKDENIKKAQDALFARCNANSHATLGTYKGDATLAEGASESLHVKDYKY

SEQ ID NO: 280980 - protein, 358 aa, Glycine max
  Clone ID: PAT_MRT3847_95747C.1.pep
MSSFKSKYQDELIANAAYIGTPGKGILAADESTGTIGKRLASINVENVEANRRALRELLFTTPGAFECLSGVILFEETLYQKTASGKPFVELMKEGGVLPGIKVDKGTVELAGTNGETTTQGLDGLGARCQKYYEAGARFAKWRAVLKIGPNEPSELAIHENAYGLARYAVICQENGLVPIVEPEILVDGPHDINKCAEVTERVLAACYKALNDHHVLLEGTLLKPNMVTPGSESKKVTPEVIAQYTVTALQRTVPAAVPAIVFLSGGQSEEEATLNLNAMNKSQGKKPWSLSFSFGRALQQSTLKAWGGKDENIKKAQDALFARCNANSHATLGTYKGDATLAEGASESLHVKDYKY

SEQ ID NO: 280981 - protein, 38 aa, Glycine max
  unsure (1)..(38): unsure at all Xaa locations
  Clone ID: PAT_MRT3847_95748C.1.pep
SLGGRDPXXXXXNGFXSHXNLQXTLIEAKKTCENRRDL

SEQ ID NO: 280982 - protein, 79 aa, Glycine max
  Clone ID: PAT_MRT3847_95749C.1.pep
LHLHLRKLSLPMAGISSSKDTDPSMTYLTISDTGRNEHPIKTGLKHLTDLNSNHLSAYSSADTPTPIRRDQTIKDIYQC

SEQ ID NO: 280983 - protein, 98 aa, Glycine max
  Clone ID: PAT_MRT3847_9574C.1.pep
GHLFGFHGGHCKEKGGRNTIVSLTAWTLFQRHSFVYHRNLHHLYHTSLDVIIVIITRYILLSCAIRSTYELCFLPLCVNNIAVEHSDLHTEVRHYVVL

SEQ ID NO: 280984 - protein, 176 aa, Glycine max
  Clone ID: PAT_MRT3847_95750C.1.pep
MGGAVVDEGPTGIKAPDGGWGWAVLFGCFIITGFSYAFPKAVSVFFKELMHEFGIGYSDTAWISSILLAMLYGTGPLCSVCVNRFGCRPVMLVGGLFASLGMVAASFCRSIIQIYLTTGVITGLGLALNFQPSLIMLNRYFNKRRPIANGLAAAGSPVFLCALSSLGQLLHDHYGW

SEQ ID NO: 280985 - protein, 164 aa, Glycine max
  Clone ID: PAT_MRT3847_95751C.1.pep
AESGPQRALSSPTAAAGLVTITPREEPQLPQPAPVTITATMSSEAETQQPPAAPPVAPALSAADTKPGTTGSGAGSGGPGGLTSAAPAGGDKKVIATKVLGTVKWFNVRNGYGFINRNDTKEDVFVHQTAIKKNNPRKYLRSVGDGETVEFDVVEGEKGAEAAN

SEQ ID NO: 280986 - protein, 107 aa, Glycine max
  Clone ID: PAT_MRT3847_95752C.1.pep
ELQEFTILSSCESSQLASSSSSSDEESTTRTPARSGRLARSSTYSARMVRKAEAIVCHPKSSLVAAMIHAIAHRVNYLWVIEDDCSLAGIATFSNMLKVFREHLETM

SEQ ID NO: 280987 - protein, 47 aa, Glycine max
  Clone ID: PAT_MRT3847_95753C.1.pep
ARSKKWSAGEGNLPTLKSCWVWYIGREMFTIADVTANLQGGTTGFTP

SEQ ID NO: 280988 - protein, 64 aa, Glycine max
  Clone ID: PAT_MRT3847_95754C.1.pep
IGKWGSDAWMSAIDRLPLIPGILEIVGHWIHWVGLYTRTIVFKPDREALVRKVKETYNEILGSN

SEQ ID NO: 280989 - protein, 138 aa, Glycine max
  unsure (1)..(138): unsure at all Xaa locations
  Clone ID: PAT_MRT3847_95755C.1.pep
PLLHSQNCSWKTTAYCRSIARNVMAMATGEAPAEAAPTEVPEIVKTLQETWDKVDDKYAVSSLALVGVVALWGSVGLISLLHHFEXAIDRLPLIPGILEIVGIGYTGWFVYKNIVFKPDREALVRKVKETYNEILGSN

SEQ ID NO: 280990 - protein, 48 aa, Glycine max
  unsure (1)..(48): unsure at all Xaa locations
  Clone ID: PAT_MRT3847_95756C.1.pep
LLHPILASSNAKTIYCAPLTIIXXSFGLQITXILAPVLAFLHXSWCXA

SEQ ID NO: 280991 - protein, 261 aa, Glycine max
  Clone ID: PAT_MRT3847_95757C.1.pep
MFEARLIQGSILKKVLEALKDLINEACWDVSSGGVNLQSMDSSHVSLVQLTLRSEGFDTYRCDRNLAMGVNLTSMSKILKCAGNEDIITLRAEDNADTLALVFEAPNQEKVSDYEMKLMDLDVEQLGIPEQEYSCVIKMPSGEFARICRDLSHIGDAVVISCAKNGVKFSASGELGNGNIKLSQTSNVDKEEEAVTIEMNEPVHLTFALRYLNFFTKATPLSPTVTLSMSADVPLVVEYKIADMGHLKYYLAPKIEDEEAS

SEQ ID NO: 280992 - protein, 65 aa, Glycine max
  Clone ID: PAT_MRT3847_95758C.1.pep
ANMLRELVLFDAASNPCSAIRVHVIKTHLQSWLFESVRMVNQNAVFMNYLKGSYSVRLRAPDESQ

SEQ ID NO: 280993 - protein, 78 aa, Glycine max
  Clone ID: PAT_MRT3847_95759C.1.pep
PAYLLWKIPSSNSNTYIVTTIMMLKWAYMNRKHVLSYYAYPETKGNEIGIPRRIPIPHFQEIMLQTCPYLTRNYLSSH

SEQ ID NO: 280994 - protein, 90 aa, Glycine max
  Clone ID: PAT_MRT3847_9575C.1.pep
HHPNLVSQVNHNPQFMATKPKVLELTVLSAEGLHVRGKPANKNVFTVVRAESLTSHTTAMANGNENGFHTWNEKFRVELGPQARCLTIEV

SEQ ID NO: 280995 - protein, 57 aa, Glycine max
  Clone ID: PAT_MRT3847_95760C.1.pep
QLQPIKTVILTIYYHSVASFITSTYTQTHFDMLNQLKHHSIHNLSPKHSIFFSPKHT

SEQ ID NO: 280996 - protein, 59 aa, Glycine max
  Clone ID: PAT_MRT3847_95761C.1.pep
ENGDQELGGLSNLPGQTPIGNSDNEPQSGDPFEAKTMGNRHINRLLMALDWDYHISTCF

SEQ ID NO: 280997 - protein, 75 aa, Glycine max
  Clone ID: PAT_MRT3847_95762C.1.pep
KNTDIAFFTVFRTPPQRWTRAVSTAAPMSLPTTCSDAHPHSSAFSIHTLDLTTATWISPTPSPSTRVRYKNYWIA

SEQ ID NO: 280998 - protein, 81 aa, Glycine max
  Clone ID: PAT_MRT3847_95763C.1.pep
MHPSLLRCLLQYFRCKVCTMIVDHITIWYYILAGACGFGEYGRKMNWYGGRVAGVSGLWRNGAGCGTCYQVPTFLFLFSFQ

SEQ ID NO: 280999 - protein, 72 aa, Glycine max
  Clone ID: PAT_MRT3847_95764C.1.pep
NHYMNGKFGFDFVLFLVIILSSKCRTLQPRCMQRDLVTSNHCIQFSNSRFSIPSNIISLWRDSLLQKAFSPL

SEQ ID NO: 281000 - protein, 29 aa, Glycine max
  Clone ID: PAT_MRT3847_95765C.1.pep
INSSKIIMMSKLLHNINGDIVLVYRSSLH

SEQ ID NO: 281001 - protein, 42 aa, Glycine max
  Clone ID: PAT_MRT3847_95766C.1.pep
QMIVVSPVDQCLGCSSSINTSLPEFDAVMSELTIHMSCSMFA

SEQ ID NO: 281002 - protein, 111 aa, Glycine max
  Clone ID: PAT_MRT3847_95767C.1.pep
HLNAHAIAQAAGTTRRGNSQYGGEQQRNNRRALRTRGEQRHQQKNKRQRNDRVLTQKLNEKREESKKPYMEAETRGVKEEEEVPHTKLGAQGQGEDQWRLKPAKIHEPENP

SEQ ID NO: 281003 - protein, 85 aa, Glycine max
  unsure (1)..(85): unsure at all Xaa locations
  Clone ID: PAT_MRT3847_95768C.1.pep
FGCIVFIVFFGLFFPFXKGIPNLGPLTWFINTLGGLYSGPNGVKTWIAPMGGVSALPFFKINFFFLKDLGGSWGKKGTPLFPLFF

SEQ ID NO: 281004 - protein, 76 aa, Glycine max
  unsure (1)..(76): unsure at all Xaa locations
  Clone ID: PAT_MRT3847_95769C.1.pep
HPLLRPHSPXASIAMASLPXARFYNNVGISQKLINPINFISATSPPPSTFRPASFKTVTSFLQKENYTNTSKKIYF

SEQ ID NO: 281005 - protein, 62 aa, Glycine max
  Clone ID: PAT_MRT3847_9576C.1.pep
TPNSKVIIPQAYGVFSPQNAKVGAIFPFEKLGFFVVAQDSPSKKLVFNRPVPLKARFTKGGK

SEQ ID NO: 281006 - protein, 139 aa, Glycine max
  unsure (1)..(139): unsure at all Xaa locations
  Clone ID: PAT_MRT3847_95770C.1.pep
GSRYLQRSSGVMILTALCRASVFIFTSPRLTLLGLDENILQAAGTICVGRIPILFAYIESFNRQTLLRSQSRNVWIAFLAALALIIHVLLWWLLTIQFKCGIPGAMMSTIXAFWMPNIGALRINTCGWCHETWAGFSYG

SEQ ID NO: 281007 - protein, 54 aa, Glycine max
  Clone ID: PAT_MRT3847_95771C.1.pep
LSSGWERESQASTCFIPWHLYRYSKIGSPFDTGKHFIMKLHNIQAMVENTRLWS

SEQ ID NO: 281008 - protein, 60 aa, Glycine max
  Clone ID: PAT_MRT3847_95772C.1.pep
NGEIFCFVFPPQRRGCGLSFKSKLSLQAKFCTLFTLKQHVIYFFTPSCNKNLGWDYYPWN

SEQ ID NO: 281009 - protein, 302 aa, Glycine max
  Clone ID: PAT_MRT3847_95773C.1.pep
MLPSFLSLVSVYSLYLRRCFTGAGLSSQTLRVDDESTLHFWAPTNPTAQKPSLVLIHGFGPESIWQWRKQVQFLAPHFNVYVPDLIFFGGSSTKSSERSETFQAASVGKLLDKLEVEKFHVVGTSYGGMVAYNLAKMLGEDRVQKVVIASSGVNMIKSSNVALVQRAQLEKIEDLMLPPTPQHLRILMKFSIHKPPQLLPDFLLRDFLAKLYGENRKEKMELLKGLTIGRDDTSRISPLQQEVLIVWGEEDRIFPLKLAHELKEIISKKARLELIKEASHVPQMEKPREFNNILLNFLQEHS

SEQ ID NO: 281010 - protein, 92 aa, Glycine max
  unsure (1)..(92): unsure at all Xaa locations
  Clone ID: PAT_MRT3847_95774C.1.pep
SREYFIPRLPLNPKANRVKMTKXMVVTMDVAGMYAAEQAVLAMYANGPATGMELDSGDGEGHTRAEHERGAVPETKGIIGALLCPDLTLELC

SEQ ID NO: 281011 - protein, 104 aa, Glycine max
  Clone ID: PAT_MRT3847_95775C.1.pep
SVRNSPVDPRVRDGIYNLIKIILITITEMWRASSKQLPVVTEVQGEYGKYFLNTSYNRRGCIFFFYFNKVLFGICLVISHARRINIVNLSCVWILYFTNKLPSC

SEQ ID NO: 281012 - protein, 64 aa, Glycine max
  Clone ID: PAT_MRT3847_95776C.1.pep
QQRKHRERERELEAVNESETKSINTCTSSTTVPLNLKGQGVVVVVHLVIGDFNTNILRKCDHHH

SEQ ID NO: 281013 - protein, 134 aa, Glycine max
  unsure (1)..(134): unsure at all Xaa locations
  Clone ID: PAT_MRT3847_95777C.1.pep
QPVRMPERNNILSKGIPGSGGSKXLELVYSGLYLGXVTGWEFXLMLIKKLGGPWGFNXLGSLGSFWVGLXWWSKAYSXPDEDPDLGAEKKKLLLEGTVXKGTGLSNSWEINLIKGTCWGLXIIFNFCHNGGTLI

SEQ ID NO: 281014 - protein, 133 aa, Glycine max
  unsure (1)..(133): unsure at all Xaa locations
  Clone ID: PAT_MRT3847_95778C.1.pep
AFVGKRRMGKLTAHEGTSRRVNILPINIGGGAHAKNAMXMTLPSAVFQMRRYVVGELAEXVDKMTPPYIQCAALSLNGLGITVFDTMNFVAFAHNPVDFGQINEKVVTKFTQQEFLTNWWAEVVPATTLMANG

SEQ ID NO: 281015 - protein, 145 aa, Glycine max
  Clone ID: PAT_MRT3847_95779C.1.pep
MVARYWCHMCSQMVNPIMDMEIRCPFCQSGFVEEMGNTPSSSSIPNTSESDFESDRALSLWAPILLGMMGNPRHPRRLRQIANDNGNRDYVDGVADHGRETEYDQEFESILRRRRNSATILQLLQGIRTGLASESYENTDGHDHG

SEQ ID NO: 281016 - protein, 38 aa, Glycine max
  unsure (1)..(38): unsure at all Xaa locations
  Clone ID: PAT_MRT3847_9577C.1.pep
PRNNFDSFMDRHHFELLRTFQDLXAATKXLAARCQLAE

SEQ ID NO: 281017 - protein, 54 aa, Glycine max
  Clone ID: PAT_MRT3847_95780C.1.pep
PFKIKMAFYNCNQTKKKNFYFSQNPPNNKSLFLHSKNFKQTDLREVSLTSYFYY

SEQ ID NO: 281018 - protein, 27 aa, Glycine max
  Clone ID: PAT_MRT3847_95781C.1.pep
ANIDIEGILPQQQPYDKRVPMTMIVCT

SEQ ID NO: 281019 - protein, 73 aa, Glycine max
  Clone ID: PAT_MRT3847_95782C.1.pep
YSTKFIHSLMSIIVYTLFVSSLVVSIAADTTSNSQFQSLSPEETIVSPRGIFELGFFNLGNPDKSYLAIRYKS

SEQ ID NO: 281020 - protein, 34 aa, Glycine max
  Clone ID: PAT_MRT3847_95783C.1.pep
KSSARVSMPESISAMVLSIRRPFTSSVIRHYVSI

SEQ ID NO: 281021 - protein, 50 aa, Glycine max
  Clone ID: PAT_MRT3847_95784C.1.pep
LKANPKRLGGKHWKTQKGLGFIFGETIHNNRENHNSWQARRLKVLFLLKQ

SEQ ID NO: 281022 - protein, 37 aa, Glycine max
  Clone ID: PAT_MRT3847_95785C.1.pep
SVGASSAHTRELQRIIMFKHLHFGHVAKSFALKHHPS

SEQ ID NO: 281023 - protein, 75 aa, Glycine max
  unsure (1)..(75): unsure at all Xaa locations
  Clone ID: PAT_MRT3847_95786C.1.pep
WRAKFKYLICIEYHAMMQTWKKSVITDLVHVQVRSSTLPHIQYHIAKTTLQQCSXTLQRRVVLCKQANRCSRILI

SEQ ID NO: 281024 - protein, 40 aa, Glycine max
  unsure (1)..(40): unsure at all Xaa locations
  Clone ID: PAT_MRT3847_95787C.1.pep
MLLQATDKLIKHWKVVRCNNVMIIRCKDNGXTGTINRVIR

SEQ ID NO: 281025 - protein, 145 aa, Glycine max
  Clone ID: PAT_MRT3847_95788C.1.pep
LHQYQAFVQLQQAILAEPTTYPDHSVIQDLILKNGCIWLPSGFSFIPTLLLEYHSSPTDAHIGVTKTMARLSENFTWIGIRKDVEQFVAACLDCQYTKYEAQKMAGLLCPLPVPCRPWEDLSFNFIIGLSEFRGYTAILVVVGRF

SEQ ID NO: 281026 - protein, 77 aa, Glycine max
  Clone ID: PAT_MRT3847_95789C.1.pep
GVLSFLLIEGAEKERYSEEVNSLVTMKNKAFGRVFELSHVLQKLKPILLVSVNSRERHSHGVPTLVSFNRNSGKTLF

SEQ ID NO: 281027 - protein, 90 aa, Glycine max
  unsure (1)..(90): unsure at all Xaa locations
  Clone ID: PAT_MRT3847_9578C.1.pep
TYIRIAYSENVPEGNLYREIESIYLLCQRLGKTTTKLLKLAIVSDGNMPTLYMRRISLVGVRGLTFLCHSLISAYKQRGGSKGXNLPDEI

SEQ ID NO: 281028 - protein, 33 aa, Glycine max
  Clone ID: PAT_MRT3847_95790C.1.pep
LLVYNVLLVRPILCCFPQPGLEGDVKPYYEPVL

SEQ ID NO: 281029 - protein, 92 aa, Glycine max
  Clone ID: PAT_MRT3847_95791C.1.pep
AIIWSRPTNFCLSLLVSWADMNIAVAGAEAVEVCGGPPIQVSPGRLDTLTQELVALSGAHTIGSKGFGSSISFENSYYKVLLEKPWTSSGAM

SEQ ID NO: 281030 - protein, 121 aa, Glycine max
  Clone ID: PAT_MRT3847_95792C.1.pep
FSLLGYFFKGCYYWALQTRETTILPLCSPSLFPFPEPKKSVSPMSFAPDSRSACATPFFSNNVTRRRLGPATTAPPSHHHCTSICVRESIFEASCARATSPLRGGVVAHRSVGVSVAWIAR

SEQ ID NO: 281031 - protein, 78 aa, Glycine max
  Clone ID: PAT_MRT3847_95793C.1.pep
PFSVYNKASKVKKQLTFLAEVLFALCNGFSLCSIFGSVFKVRKLNGVHSLNLVSLFIANDMLYIFISAPVRQWIVVGD

SEQ ID NO: 281032 - protein, 120 aa, Glycine max
  Clone ID: PAT_MRT3847_95794C.1.pep
MAGNSNRREGKPVMVPKTEDLGYELPPYTSFSGDVGDNVASSSGGKLRAFFIGMGFLPCLVDKVIEENGEENSDTLLEALLRYSAHKSNCDSFDSLGVSHNTSRGRSAPNFYPDGHSREA

SEQ ID NO: 281033 - protein, 85 aa, Glycine max
  unsure (1)..(85): unsure at all Xaa locations
  Clone ID: PAT_MRT3847_95795C.1.pep
MNTAKKKSGRSKGSKLSTASKLTYTCIILSTYFIAVPKFNQLADCXQRGDSQNNGLTQHNPFARHPNIDKWRNNQHAQNDRTFKH

SEQ ID NO: 281034 - protein, 68 aa, Glycine max
  Clone ID: PAT_MRT3847_95796C.1.pep
QSIMYVVVYCLSCLIYEGEHVCVLCFGGFILAYERAGWSFAGIGAGFDAVLCCDFSSKMLVFFLFTLW

SEQ ID NO: 281035 - protein, 42 aa, Glycine max
  Clone ID: PAT_MRT3847_95797C.1.pep
TTTETLVMEVDTVKVQYERTEMGVPPENIGCKCGANCACNPC

SEQ ID NO: 281036 - protein, 76 aa, Glycine max
  Clone ID: PAT_MRT3847_95798C.1.pep
SRCKKKGCVRAAQSKGLCKSHGGGEYCAVEGCNKKAHLKHLCRTHGGGVRCKFEKCSKWAQRKGWCMAHAKEFAAP

SEQ ID NO: 281037 - protein, 80 aa, Glycine max
  Clone ID: PAT_MRT3847_95799C.1.pep
QKQSLLDLQEFLNFFLLLCVRFLKGKKITLCAGYRLRESFSFPLLVYLLNTLLFDIGPSCSDYKPSFWFPFLQFLLLHIF

SEQ ID NO: 281038 - protein, 241 aa, Glycine max
  Clone ID: PAT_MRT3847_9579C.1.pep
GFLHIYNFLEMANVSMLSHYAGKGGECRSSLDWDSRLRIAIGAVRGIAHIHAQHGGKLVHGNIKASNIFLNSQGYGCISDIGLATLMSPIPMPAMRATGYRAPEVTDTRKATHASDVYSFGVLLLELLTGKSPINSTEGEQVVHLVRWVNSVVREEWTAEVFDVQLLRYPNIEEEMVGMLQIGMACAARIPDQRPKMPDVVRMIEEIRRVNTPNLPSTESRSEASTPTPRAVDIPSTSVQQ

SEQ ID NO: 281039 - protein, 42 aa, Glycine max
  unsure (1)..(42): unsure at all Xaa locations
  Clone ID: PAT_MRT3847_957C.1.pep
WIMIWKTTAVXFIVQKSKDKQLTITSSNKASDHHIRQQQIKM

SEQ ID NO: 281040 - protein, 70 aa, Glycine max
  Clone ID: PAT_MRT3847_95800C.1.pep
INLFHIRLIMSCSTMDFNFDSPLQRDTNICNIKKNYYYFLDNLKKNYYLLLLIIETILKGSSTSIIHLYY

SEQ ID NO: 281041 - protein, 66 aa, Glycine max
  Clone ID: PAT_MRT3847_95801C.1.pep
TEHHHCLSGPCVDVDRAPPPFAMALSGSRLTTNIIHPRVINSGSRTTYKGSPPYNAEFRKYVLSLN

SEQ ID NO: 281042 - protein, 38 aa, Glycine max
  unsure (1)..(38): unsure at all Xaa locations
  Clone ID: PAT_MRT3847_95802C.1.pep
LXCISMSKTFXPQXCQXXQFVVTPLNXHSXFPXTPHPH

SEQ ID NO: 281043 - protein, 44 aa, Glycine max
  Clone ID: PAT_MRT3847_95803C.1.pep
VTHMLEQPYMQLSITKHYISNDASIHKTYHQMYSYVTAHLKHFD

SEQ ID NO: 281044 - protein, 89 aa, Glycine max
  Clone ID: PAT_MRT3847_95804C.1.pep
STNCRFITPALSLTHSQVVSVTHNIFIHVKYCITTTQTKNQNFFCNLQPNISPPSFNQNYLTPSREKDRRRASKASKSIDQFNVCYSQN

SEQ ID NO: 281045 - protein, 71 aa, Glycine max
  Clone ID: PAT_MRT3847_95805C.1.pep
PMFARIKIVFEQYFDTLSWRKYDECTGMLMLCMIQMHFTDTRARKIISFHLQKFGRHGSFAVITTVPHVCI

SEQ ID NO: 281046 - protein, 162 aa, Glycine max
  unsure (1)..(162): unsure at all Xaa locations
  Clone ID: PAT_MRT3847_95806C.1.pep
MKKKTKKKRKKSEGAEAAKQKITTTGKQHPSTTGKKEKKKNATKPSPVRTFPNGLIIEEVFMGKXPDGKKAAPGKKVSVKYIXKLQKDGKIFDSNVGRAPFKFRLGVGQVIKGWEVGINGMRIGDKRRITIPPSMGYADKRVGSIPPNSWLVFDVELVDVDR

SEQ ID NO: 281047 - protein, 54 aa, Glycine max
  Clone ID: PAT_MRT3847_95807C.1.pep
PPLFFFLIMSVALLSSNTFTNCILFFYPIMCFVPLFQFYYFFLLLLWIILCFIK

SEQ ID NO: 281048 - protein, 102 aa, Glycine max
  Clone ID: PAT_MRT3847_95808C.1.pep
SITGSASSLLTGRPSSFFFFLLLIQYTCVADYSERVSTPPLPSTWATSYSFFLTAFEHIAIITYAFLNYSAKLKYGIGYYNRVDHAVGAKALERVVRPTFSF

SEQ ID NO: 281049 - protein, 70 aa, Glycine max
  Clone ID: PAT_MRT3847_95809C.1.pep
RGGWARCGAGHNVVPFNPLRVHHSNTHSSLLACCHGTINILSSNRRQNITDSLRWLFPNRNAIDDSCNDF

SEQ ID NO: 281050 - protein, 92 aa, Glycine max
  Clone ID: PAT_MRT3847_9580C.1.pep
SEGGLISSIISKYWLLPCDYTRPDIFQGCAIGRLRDHYIYKADLHADSCHPSNSMGLDVHSDKFKNLMGEPWAKFLHQNHQSGGDFDLSAAR

SEQ ID NO: 281051 - protein, 63 aa, Glycine max
  Clone ID: PAT_MRT3847_95810C.1.pep
RWMSVRRPPCSLLAVCFSAPGECLPSRLLHLLPLPPSQPLSLCLDVRVQRPRVYIRETKAVAC

SEQ ID NO: 281052 - protein, 55 aa, Glycine max
  Clone ID: PAT_MRT3847_95811C.1.pep
RWVQLLNCKSIACLLCFHNISEHPMFRNTRLELKPILLTLQTLNDETTNLQFSEI

SEQ ID NO: 281053 - protein, 43 aa, Glycine max
  Clone ID: PAT_MRT3847_95812C.1.pep
ICISFLCHEIICTHQLNEFSIIPCDNCKFTSGLRQCWCRIRHE

SEQ ID NO: 281054 - protein, 38 aa, Glycine max
  Clone ID: PAT_MRT3847_95813C.1.pep
IERLHLPQLFFFSLFNFKTYFLKKGWTFTFENRIKKKH

SEQ ID NO: 281055 - protein, 46 aa, Glycine max
  Clone ID: PAT_MRT3847_95814C.1.pep
LSITVSKLINEWCPVINYVIARHYVIPSKKLEIKTLSLAESWWMSI

SEQ ID NO: 281056 - protein, 40 aa, Glycine max
  Clone ID: PAT_MRT3847_95815C.1.pep
RSNACYMRSIIRCSRSTRNLVSKAQWCTFLDSRYDYSLIY

SEQ ID NO: 281057 - protein, 153 aa, Glycine max
  unsure (1)..(153): unsure at all Xaa locations
  Clone ID: PAT_MRT3847_95816C.1.pep
DINSPSTMKRWIYVHYVRAHTHDIRALAVAVPISHEDIKPEKRIKRARRAENPISFRYHKWAHLGVPMLISAGDDTKLFAYPAKEFTMFSPHDICPAPQRTPIQLVHNSVFNQRXLLLIQSSQKIEVHLLQLXKVCTSGGFTKNDVVAEVKSK

SEQ ID NO: 281058 - protein, 68 aa, Glycine max
  unsure (1)..(68): unsure at all Xaa locations
  Clone ID: PAT_MRT3847_95817C.1.pep
IDHVPFKIIFLQTLIWLYPASFFYVXQSMVIGXLKFIRVLYYFKTMSVIFGQGFVSVANTLLKLEVVI

SEQ ID NO: 281059 - protein, 304 aa, Glycine max
  unsure (1)..(304): unsure at all Xaa locations
  Clone ID: PAT_MRT3847_95818C.1.pep
MWQRSHKSSEERKLELRLGPPGEESLNESIRKSNRERNESQFTLGCFSTQNFFTSDKQGPGGTTLPSAWPSTSYHHQHQAKAKASSFLQLQSSPQNMIVMGKDVSQFSCVEKKVFSPSCANPAVSKRTSSGPAVGWPPIRSFRKNIASGSTSKLPSGSHQQHQNVVPYKVASQKPTDKSGKGLFVKINMDGVPIGRKVDINAYDSYEKLSSAVDELFRGLLAEMKLSHIGSSQCXKAITGLLDGSGEFTLVYEDNEGDRMLVGDVPWHMFVSTVKRLRVLKSSELSAFTLGSKQDKIPLDSAMK

SEQ ID NO: 281060 - protein, 36 aa, Glycine max
  Clone ID: PAT_MRT3847_95819C.1.pep
YDSIASKARGSNVTFSSFPLGYLGTSNLVRNWRGLR

SEQ ID NO: 281061 - protein, 75 aa, Glycine max
  unsure (1)..(75): unsure at all Xaa locations
  Clone ID: PAT_MRT3847_9581C.1.pep
KMGLXXXXXXXXXGIXLLXNIXXXXKLHXXTFSIXXNGXXQITXTIXXXXXSXAXXXXXTXTTQXXXXXXXPYSM

SEQ ID NO: 281062 - protein, 183 aa, Glycine max
  unsure (1)..(183): unsure at all Xaa locations
  Clone ID: PAT_MRT3847_95820C.1.pep
FAAVIAAASNIASLRHGQQFHNQVIKMGLDDDPFVTNSLVDMYAKCGSIEESHKAFSSTNQRDIACWNSMISTYAQHGDAAKALEVFERMIMEGVKPNYVTFVGLLSACSHAGLLDLGFHHFESMSKFGIEPXIDHYACMVSLLGRAGKIYEAKEFVXKMPIXPAAVVWRSLLSACRVSSHVE

SEQ ID NO: 281063 - protein, 69 aa, Glycine max
  Clone ID: PAT_MRT3847_95821C.1.pep
FVCLSLSLSLSLSLSLEFWLLSFSLSLILYHLSDINGHCRFLWFATWVGAFSTPAVPICSKAVVGMGPN

SEQ ID NO: 281064 - protein, 105 aa, Glycine max
  unsure (1)..(105): unsure at all Xaa locations
  Clone ID: PAT_MRT3847_95822C.1.pep
ITIANITILYISLRLGSQTREWRWTCITTCNQSAPKVPTILYLTNLDLVNKXLYFIDHPGAVPITTAQXKTQENGKAVFDAPITLVLNPPPHNKKKPNAHKACSI

SEQ ID NO: 281065 - protein, 99 aa, Glycine max
  unsure (1)..(99): unsure at all Xaa locations
  Clone ID: PAT_MRT3847_95823C.1.pep
HSKCLYLFVATVLVPHECHGPYYHQFLLQLKTGFGGQYINDVACATWKLGVRDTTVVKSQAVPAACXEYIADYVLRDQXTSHSTTVNHDAYIYAISSYS

SEQ ID NO: 281066 - protein, 133 aa, Glycine max
  Clone ID: PAT_MRT3847_95824C.1.pep
LTITNYARPLKDLRCVTNQTDPTIQDINPAHAGRQCLNLCYFVALLSERTVILLDSSKNQKQLCDQMNPIKRHCNHMTMRIPIENIPVLYDGCHRENYYEDSSEDVAASNLILDAESTGDIEIPELDDLYSVL

SEQ ID NO: 281067 - protein, 108 aa, Glycine max
  Clone ID: PAT_MRT3847_95825C.1.pep
ILSPTVNVFCFLSVDVLAASQESLTPLSVFSGHGYFQRMATTTTEFDLDYEFPDLDYDLRYLSLAGIDALTAFQNLLPVSSLSLSLSHSLTQFTFDWSHLCHAIKHVL

SEQ ID NO: 281068 - protein, 39 aa, Glycine max
  Clone ID: PAT_MRT3847_95826C.1.pep
TETNKNFIIDQIITAPMVNILCERNLQDRHESLTCFSVY

SEQ ID NO: 281069 - protein, 203 aa, Glycine max
  unsure (1)..(203): unsure at all Xaa locations
  Clone ID: PAT_MRT3847_95827C.1.pep
EILWDLSNAKYESGPEPVXGFHVLIIIDSEIGLVLGDTAAAEETVSKRQNFKNNKNTPLAKVSLLSRREHCSGNTLYTTKAQFCDTGTWHDVMIRCSVEKENEGLLFKSPVLCVCIDKKTVIRVKRLHWNFRGNQTIFVDGLLVDLLWDVHDWFFNSSSSGYAVFMFRTRSGMDSRLWFEEKNAHKDKDRVEFSLLIYACKTS

SEQ ID NO: 281070 - protein, 101 aa, Glycine max
  Clone ID: PAT_MRT3847_95828C.1.pep
NYLDRNAIALARLNDLKEDLNLSSSEYQTCVSILFVGYILGQIPSNMILTRVRPSWYMAGFMALWAAVSALTALAKDFKGFLLTRFFLGITGIVPSTCTHD

SEQ ID NO: 281071 - protein, 43 aa, Glycine max
  Clone ID: PAT_MRT3847_95829C.1.pep
LFLLLACVGYLCKSIFAFSDSMIRKRLQINYHLLYHCQIKTYD

SEQ ID NO: 281072 - protein, 196 aa, Glycine max
  Clone ID: PAT_MRT3847_9582C.1.pep
MDQQNQNNTPDGSGEVPLKRKRGRPRKYPKPDSEESSYILVSQNRRQNPVRAEQAPVPPGFEGVNGNQQLQRGQENHSNNAMVGQLVSGVIEAAFDAGYLLSVRVGDSNTTLRGLIFKPGRYVPISPDNDVAPSVPMIQRNEVCFPSRAAQVQTPLPKERNEQPVNVHRVETLAMNGSHLDLRYLEELSALVTSCL

SEQ ID NO: 281073 - protein, 108 aa, Glycine max
  unsure (1)..(108): unsure at all Xaa locations
  Clone ID: PAT_MRT3847_95830C.1.pep
MEEQQSKTTQELAMEGQKYLEETIENAFQILSSMNDELCNPVLWSTSPSASFSPNADATXENSNHHADATTAAAGGGGALEQARSRYKKAVAALRTILTGIPNFQKAN

SEQ ID NO: 281074 - protein, 97 aa, Glycine max
  unsure (1)..(97): unsure at all Xaa locations
  Clone ID: PAT_MRT3847_95831C.1.pep
GRSRADLLTEAFTELKQWANVQSSKYGILLVAGHRGSQRLGTGLKVLCAIIHKDGETATKKFYGLKVCMLHEIVXTHLAAYDRQWMHVGFPPSGPLL

SEQ ID NO: 281075 - protein, 500 aa, Glycine max
  Clone ID: PAT_MRT3847_95832C.1.pep
SFRIDCSLLCVSASAEMSPMHPEIQCAEVPASTRLNDAKSQPSNSIPDRTLMIEEVGAEIEKQNMQESDVDRNNDLTLRHSKMHCNSSVSEICGKEGQDCLDKKCSSSLTNTTDRHIEMIRNSEITEAVIIDSKCDSLTLNGEGHQEYQSTCKSNNVEAALSPASLVNHSTLASVVGSFGSPNNNYTAEKISSLIFLEKTTEEEIDSLSERDKEPLIDDRQISEHTLKEVCEVRRELYASADLHNTIVLDYEMQHETQGGKDSRKEINQSTHVSAITRGEYAEGLNDEVIPKSVEQCQFENMNKITMEPVSSYVAKGENKCVTSSELGGSEVLVETCPKKDSCIQLISDKEKETEIHSVSRIDEEFCSGTDTSIDDSSSIQECSKIEQKSCVTENINGIKTNLSQDNRELESCEFSTPVPRSNAGKNRKRKVKHTPKTKSNCINFIKSPCKGLRPKAGKIAADKSGVEINQVDKEVESKNKVCALNDFMYFTLLTSKFSG

SEQ ID NO: 281076 - protein, 87 aa, Glycine max
  unsure (1)..(87): unsure at all Xaa locations
  Clone ID: PAT_MRT3847_95833C.1.pep
SYYFACTRXDVCYLISSLNSTFFLMTAFLLMMSGMVRLLGRKILSHHLQFMYPCLLALSIPSIYGGYHCSNYSGIRWLGVSCPPENP

SEQ ID NO: 281077 - protein, 78 aa, Glycine max
  Clone ID: PAT_MRT3847_95834C.1.pep
SLSQTIFSLTQITRIHRNRLVVHSLGYKHQTTSTHEHYIIVSPHYMISTLLSMITELFYYTDDISPAHPFGLITFALL

SEQ ID NO: 281078 - protein, 97 aa, Glycine max
  Clone ID: PAT_MRT3847_95835C.1.pep
TPFLLNKKKPQREVLYNPFSLHNQKGLGLNRRTTFGTGHMPPHKIKNSPTKRDLRGLRGNPPDFWGGGGKIPKNFFFFQRSLETLPHHVGERPGKFL

SEQ ID NO: 281079 - protein, 79 aa, Glycine max
  Clone ID: PAT_MRT3847_95836C.1.pep
GSTIFSGGALCVFKRVRGFFLVENYAGKSLPFCVFTIGGLLGGKKSLWGHYYWGVLSLEQSNKKIFLKLFKFLKYPRYF

SEQ ID NO: 281080 - protein, 182 aa, Glycine max
  unsure (1)..(182): unsure at all Xaa locations
  Clone ID: PAT_MRT3847_95837C.1.pep
ASMGLKEGPXFFFAIGLAHYIVMFVTLYQRLXPTNETLTKELHPVFFLFVAAPXSVASMAWANIQGSFDYGSRIAYFIALFLYFSLAVRINFFRGFIFSLAWWAYTFPMTGAAIATVRYSNQVTNPVTKTLCVILSLISTLIVIALLVSTILHAFVFKNLFPNDLAIAISYRKRRPKKWLGL

SEQ ID NO: 281081 - protein, 198 aa, Glycine max
  Clone ID: PAT_MRT3847_95838C.1.pep
MLAVAPYSPAAPPPLSLLFDITPPPSPSMYPTPPAPPVTPPPETLLVQDSPPPSSVTPLPLTEPLLPSPSPESLPPPLPSSTVTPSPPTPTAESQPPPFPFATAPAPTTFPPFAVAPSPPTPTATFPPALPEMPPATAATVTVPSPPQHPPFMTEPTLATPWFPALPASAPEVNFPSTARGGSLPVAVDVQKPSTFHV

SEQ ID NO: 281082 - protein, 38 aa, Glycine max
  Clone ID: PAT_MRT3847_95839C.1.pep
LTLGFLNIRIETYYCYRLLAFPRPESKALLERIRASTR

SEQ ID NO: 281083 - protein, 446 aa, Glycine max
  Clone ID: PAT_MRT3847_9583C.1.pep
MDQQNQNNTPDGSGEVPLKRKRGRPRKYPKPDSEESSYILVSQNKRQNPVRAEQAPVPPGFEGVNGNQQLQRGQENHSNNELVGQVVSGVIEAVFDAGYLLSVRVGDSNTTLRGLIFKPGRYVPISPDNDVAPSVPMIQRNEVCFPSRAAQVQTPLPKERNEQPVNVHRVETLAMNGSPSVPQVPGGAVSSSNLVASTRNSVPSVTGQTTHQLPRGNVVPVLPQPNNFTNGVPVSNQPSQAKTQVSLGSGVVAAKEIPVDGNHALVSHTQTSQNLLPTSMQSEGVPPPHNQSSSNVANEDQAKSVRMPGMPFEQLVTEVVKRIQAPSDAMDTKIDNSKSGDITVAKDPSGRQEDKVNEMDQPPILIKPLQAVQSHPQESSTSAPKPADCTETGRVNELLQVLQHNKTENQASSIAAELGSGNKLDDIRNLETGLEDGGTVQSAKPF

SEQ ID NO: 281084 - protein, 48 aa, Glycine max
  Clone ID: PAT_MRT3847_95840C.1.pep
LSYFLWMFYSEEPSSLYVCVKLQFFGLISDSLNSFKKFNLSYCIGITC

SEQ ID NO: 281085 - protein, 112 aa, Glycine max
  Clone ID: PAT_MRT3847_95841C.1.pep
REGEQKELFEEAKSILEQEYGPYHPETLGVSSNLAATYDAIGRLDDAIQILEYVVNTREEKLGTANPEVDDEKRRLGELLKEAGRVRSRKTRSLENLLDGNAHAANNVVIRA

SEQ ID NO: 281086 - protein, 79 aa, Glycine max
  Clone ID: PAT_MRT3847_95842C.1.pep
VDRGSTCHVYITLALVKRRTVNLVSEFRNRHNRVKVLFVDIYQENNIYLSLSCIHRGVDSLFDTLTTMGADHCYPHQRQ

SEQ ID NO: 281087 - protein, 902 aa, Glycine max
  unsure (1)..(902): unsure at all Xaa locations
  Clone ID: PAT_MRT3847_95843C.1.pep
MATENPFNSILTTLEKPGGAGEFGKYFSLPALNDRRIDRLPYSVRILLESAIRNCDEFQVKSNDVEKIIDWENTSPKLVEIPFKPARVLLQDFTRVPAIIDLACMRNAMNKLGADSNKINTLEPVDLLIDHSDQVDMAISENAVQKIMELXFQTKNKRFGLLKCGSNAFXNMLGIPPGSVIVHQLNLNYPDRVKLKRKGIVDPCCVVGTDPHTTMIDGQVFCFINQYVAMEGXAAMLGEPMFKFFSSRGASIIFTQSTKLKNPSPSESNSXSTVAASLNSNTPPIVPSRFLXELGISYHPHLHQNTPEHAQTMXVFDTEPIELXRMKLRASSRDIFSMSEEISHVIKLIVEYGVXRSQRMHSSNWELNLVDVEPCLSGPKRPHDRVPLXEMKVDWHACLNNKVGFKGFAVPKESQNKVAEFTFQGTPAHLRHGDVVIAAITSCTNTSNPSVMLGAALVAKKACELGLQVKPWIKTSLAPRAXVVTKYLQRSGLQKYLNELGFNIVGYGCTTCIGNSGDINEAVASAITENDIVAAAVLSGNRNFEGRVHPLTRANYLASPPLVVAYALAGTVDIDFDTEPIGIGKDGTEIFFKDIWPSSEEIANVVQSSVLPDMFRDTYNAITQGNPMWNNLSVPTGTLYAWDPTSTYIHEPPYFRDMSMSPPGSHGVKDAYCLLNFGDSITTDHISPAGSIHKDSPAARYLIERGVDRRDFNSYGSRRGNDEVMARGTFANIRIVNKFLNGEVGPKTIHIPSGEKLSVFDVAEKYKSEGHDMIILAGAEYGSGSSRDWAAKGPMLLGVKAVIAKSFERIHRSNLVGMGIIPLCFKPGEDADSLGLTGQERYTIDLPSNVNEIRPGQDVTVVTDTGKSFVSTLRFDTEVELAYFNHGGILQYVIRNLINAKH

SEQ ID NO: 281088 - protein, 73 aa, Glycine max
  Clone ID: PAT_MRT3847_95844C.1.pep
AMTFMASLISSNSHQWQIITICPKVWYELSPKQPKKNHTVKVRVYKENIELDTGKVSMVTVRGSLKDNYHVYF

SEQ ID NO: 281089 - protein, 64 aa, Glycine max
  unsure (1)..(64): unsure at all Xaa locations
  Clone ID: PAT_MRT3847_95845C.1.pep
ELLLXTQPPSAIXIAHCFKQXDLPLWLFGIQNXGVVGNSNEHSXXGXPRKWVGINAXAMXXVGX

SEQ ID NO: 281090 - protein, 370 aa, Glycine max
  unsure (1)..(370): unsure at all Xaa locations
  Clone ID: PAT_MRT3847_95846C.1.pep
MDRLLSSCSSSLNTNLKPFSLLPRFDSVRFNPFSSTRCSFTSISSKHETPPPLSSSPPKTLPPLSPSPLIHFHASVPPSQPLTPNNFQNPKAITARTFAILSSLVLLLIQPAFAPAAFATFQNAAKTGGPAAAAVGGKLIRTELLTSAWTGFFAGCLHTLSGPDHLAALAPLSIGRTRMESAAVGALWGCGHDAGQVIFGLIFLLXKDRLHIEIIRTWGTRVVGLTLLIIGVLGIKEASEVHAPIVALESDECNVNVYESLDNPTVGKKKIGFATFATGIVHGLQPDALMMVLPALALPSRLAGAAFLIMFLIGTVIAMGSYTVFIGSCSQALKDRVPRITEKLTWASSLIAIALGLAIIISQFFGFHLY

SEQ ID NO: 281091 - protein, 205 aa, Glycine max
  unsure (1)..(205): unsure at all Xaa locations
  Clone ID: PAT_MRT3847_95847C.1.pep
ELADESHGPKSLTSRYSNLCWEAIKYAEEGALTVETYDTAISALRESGKKISFMRRSVAKVAPPSHPVSGTAYDDRKSPTSAADTNPLLWPLQDETTQRFNLNDDSTPVQSVADLNLPQMTPVSLQRDDGPPEMVVYPCLKSLTWVMENKNSTPGNRVAVISLKLQDYSRIPSTESEVRFNLSKVTLEPFVXHMVNISDQLSIPT

SEQ ID NO: 281092 - protein, 53 aa, Glycine max
  Clone ID: PAT_MRT3847_95848C.1.pep
LNYKLVIICCSDSQCVPSLMDSGNSGLSIETDLQLIIKSLQLLWRIQFCECCQ

SEQ ID NO: 281093 - protein, 146 aa, Glycine max
  unsure (1)..(146): unsure at all Xaa locations
  Clone ID: PAT_MRT3847_95849C.1.pep
FRLRVRMNVPNAGLTMWRCHVGYLESQVAEPTCAYIKCTXVSCLMAFGEQADDTINLVAFTDWLMRWAQMQEQGVQELPQEELFTAWSTDVRAATSTPADGRTYLYAMVHDHSQCTXPGVHAIGVMQAARNNWSAHGLNAGILGSR

SEQ ID NO: 281094 - protein, 95 aa, Glycine max
  Clone ID: PAT_MRT3847_9584C.1.pep
MGHRHLYSSSPMFEGEPDQNWNHMHMDQQYVNLGRSSTSDNGSFIYPSENMSIDNISFPSHWNTAPKSNGYAFTSLNIEAPPHQTDVSCTSHDHF

SEQ ID NO: 281095 - protein, 74 aa, Glycine max
  Clone ID: PAT_MRT3847_95850C.1.pep
GIKSVFSFSIRKSSAELGFEDSLGQDRPQASLSAWKYFYRSFTNKVLVMKIELAPFCYEFLTNWTNFCQLKSVN

SEQ ID NO: 281096 - protein, 70 aa, Glycine max
  Clone ID: PAT_MRT3847_95851C.1.pep
HTSDLKQLDFCLFLAALNWRIFLRTNHLHILCCCNMKRNRGFRDIPREFYVQISDTISLLSFGTLASSPS

SEQ ID NO: 281097 - protein, 98 aa, Glycine max
  unsure (1)..(98): unsure at all Xaa locations
  Clone ID: PAT_MRT3847_95852C.1.pep
TYHGLALNVTXNLCLFKWMVPCGIHGHGHQVSIKGLVREGKLCIDHGTDLHHLDDASFIHITHKSLIEEFSQAFQLEYCYKNISAAMLYERKHSSLTK

SEQ ID NO: 281098 - protein, 135 aa, Glycine max
  unsure (1)..(135): unsure at all Xaa locations
  Clone ID: PAT_MRT3847_95853C.1.pep
FVVLMEQSWENWPLDMGMEEDRDLRDEEEFLRNILSEPSESEMVTVGSAKRPPRTYILSFDNSTIIPATPEPTSRKRTRQPQNLNLEPVKPNPNTQPGKRGRSCSQTLDHIMAERKRRQXSPEVHCLSAISWLRX

SEQ ID NO: 281099 - protein, 59 aa, Glycine max
  Clone ID: PAT_MRT3847_95854C.1.pep
SQVQVTMVKAHGFGIIYFCYCNGSEWNLEQHCRDYMNGEHIQVLITNNPWLWMGIQHLH

SEQ ID NO: 281100 - protein, 42 aa, Glycine max
  Clone ID: PAT_MRT3847_95855C.1.pep
VKSKATGSPLSTVPGYDLSGVAVKVGTQVKDLKVHDETYGDR

SEQ ID NO: 281101 - protein, 97 aa, Glycine max
  unsure (1)..(97): unsure at all Xaa locations
  Clone ID: PAT_MRT3847_95856C.1.pep
KLTALNSTVRRSLLNGLNQNCYHLCSSALMPYSAAXTMLLCSRCTNXWFFYCNMTIVSPAKAKLPYNDKDEENANAYKTIMKSTYYRISKPNVFIDD

SEQ ID NO: 281102 - protein, 49 aa, Glycine max
  Clone ID: PAT_MRT3847_95857C.1.pep
DDGKTVYRVFRDRDVPKTLDCARHCLASTIEYGYGTDPSRLDIPSPEPS

SEQ ID NO: 281103 - protein, 54 aa, Glycine max
  Clone ID: PAT_MRT3847_95858C.1.pep
PPSQFFLTKTHPNTLSFPSNYQFPHNLLVKNKHPLYLNQPPRPSNFFDYQLQLS

SEQ ID NO: 281104 - protein, 439 aa, Glycine max
  unsure (1)..(439): unsure at all Xaa locations
  Clone ID: PAT_MRT3847_95859C.1.pep
MALRSFSYDVFLSFRGEDTRYGFTGYLYNVLRERGIHTFIDDDEPQEGDEITTALEAAIEKSKIFIIVLSENYASSSFCLNSLTHILNFTKENNDVLVLPVFYRVNPSDVRHHRGSFGEALANHEKKSNSNNMEKLETWKMALHQVSNISGHHFQHDGNKYEYKFIKEIVESVSNKFNHDHLHVSDVLVGLESPVLEVKSLLDVGRDDVVHMVGIHGLAGVGKTTLAIAVYNSIAGHFEASCFLENVKRTSNTINGLEKLQSFLLSKTAGEIKLTNWREGIPIIKRKLKQKKVLLILDDVDEDKQLQALIGSPDWFGLGSRIIITTRDEHLLALHNVKITYKVRELNEKHALQLLTQKAFELEKGIDPSYHDILNRAVTYASGLPFVLEVIGSNLFGKSIEEWKSALDGYERIPHKXNLCILKVSYDALNEDEKSIFLA

SEQ ID NO: 281105 - protein, 94 aa, Glycine max
  Clone ID: PAT_MRT3847_9585C.1.pep
KTGGLYNTKPQTPDVHVQSRTHAAEQKHNTIQRNKKNRPGPISKRKMQAPTLKNSDPRDDRPQTLMHPEHKMQAQLSEQTKVLGHATPRLDRMR

SEQ ID NO: 281106 - protein, 65 aa, Glycine max
  Clone ID: PAT_MRT3847_95860C.1.pep
KNWNEQLNCKLLALNMLDSLCIIKLIYTQWSSSSSSLSLELFAQMDYLVFTHPHTYWEAEYIKAI

SEQ ID NO: 281107 - protein, 58 aa, Glycine max
  Clone ID: PAT_MRT3847_95861C.1.pep
LSTSSFAASEELSLNSIAAIALTLIIFSYFLIRGCMSKSWTHIIHVQIWFLQICILSC

SEQ ID NO: 281108 - protein, 120 aa, Glycine max
  Clone ID: PAT_MRT3847_95862C.1.pep
LNLLRGYRDASISISNFLNTDLHLIITQKGRWGQLSTPHKFLQGQPSGEDSHQHTTHICLIHRGLDFARGIYITSLCADTSSKRTNLCFRRQYNSLKLHLRLHLAEGQHKLSSHFFSDRL

SEQ ID NO: 281109 - protein, 55 aa, Glycine max
  Clone ID: PAT_MRT3847_95863C.1.pep
RPGIVNIYRGAFNIKLKPFCLPTPILRYKLSTSTTNSTWGKCANFNQRPTKKGLL

SEQ ID NO: 281110 - protein, 110 aa, Glycine max
  unsure (1)..(110): unsure at all Xaa locations
  Clone ID: PAT_MRT3847_95864C.1.pep
QHNPHIHDPDFDYLNNLQLEHKINKFKCCQTSIVALFLLSTNDKTIKFCTXHYNNFYKFSYINFDPKLIKNFSIAISSNSLNYKSSSFNIHYLQIDHIIIKHLFLIFTKH

SEQ ID NO: 281111 - protein, 51 aa, Glycine max
  unsure (1)..(51): unsure at all Xaa locations
  Clone ID: PAT_MRT3847_95865C.1.pep
TKEGFFQTIRVIPNTRRALTFLKKKKLWRKLINAQSSLLDLTXGRALIPRA

SEQ ID NO: 281112 - protein, 49 aa, Glycine max
  Clone ID: PAT_MRT3847_95866C.1.pep
IAGSEPGVRTVGRRRQKGYHLPNLYIQLNLYKNNFLKIFFFCINFYTSL

SEQ ID NO: 281113 - protein, 83 aa, Glycine max
  unsure (1)..(83): unsure at all Xaa locations
  Clone ID: PAT_MRT3847_95867C.1.pep
EWQAIKQLPAPDELGTEFQFQSDFLCPVSRDQASEWTPPYAXPCMHVRGKRSLVKLSHGGTRTCKCPYCPPKATVAIYKQLCF

SEQ ID NO: 281114 - protein, 320 aa, Glycine max
  unsure (1)..(320): unsure at all Xaa locations
  Clone ID: PAT_MRT3847_95868C.1.pep
MSKARVYTDVNVLRPKEYWDYESLTLQWGFYNHLVLPCADDQDDYEVVRKVGRGKYSEVFEGINVNSNERCIIKILKPVKKKKIKREIKILQNICGGPNIVKLLDIVRDQHSKTPSLIFEXLDYCHSQGIMHRDVKPHNVMIDHELRKLRLIDWGLAEFYHPGKEYNVRVASRYFKGPELLVDLQDYDYSLDMWSLGCMFAGMIFRKEPFFYGHDNHDQLVKIAKVLGTDELNAYLNKYHLELDPQLDALVGRHSRKPCRKPWSKFINADNQHLVSPEAIDFLDKLLRYDHQDRLTAREAMAHPYFSQVRAAESSRMRTQ

SEQ ID NO: 281115 - protein, 195 aa, Glycine max
  unsure (1)..(195): unsure at all Xaa locations
  Clone ID: PAT_MRT3847_95869C.1.pep
MSKARVYTDVNVLRPKEYSDYESLTLQWGDQDDYEVVRKVGRGKYSEVFEGISVNSNERCIIKILKPVKKKKIKREIKILQNICGGPNIVKLLDIVRDQHSKTPSLIFEYVNSTDFKVLYPTLTDYDIRYYIYELLKALDYCHSQGIMHXRDVKPHNVMIDHELRKLRLIDWGLAEFYHPGKXYNVRVASRTLRA

SEQ ID NO: 281116 - protein, 98 aa, Glycine max
  Clone ID: PAT_MRT3847_9586C.1.pep
YQCFSPKASIFIFLVSEKMWGRWWWRAGGGFLRQRVSSIGSVSHGYGEKLHPLDPPLLGLRGVVEVMCGGRRTPLSVVLNQIKRGVSTSTWEWWCQQW

SEQ ID NO: 281117 - protein, 334 aa, Glycine max
  unsure (1)..(334): unsure at all Xaa locations
  Clone ID: PAT_MRT3847_95871C.1.pep
MSKARVYTDVNVLRPKEYWDYESLTVQWGDQDDYEVVRKVGRGKYSEVFEGINVNSNERCVIKILKPVKKKKIKREIKILQNLCGGPNIVKLLDIVRDQHSKTPSLIFEYVNSTDFKVLYPTLTDYDIRYYIYELLKALDYCHSQGXIMHRDVKPHNVMIDHELRKLRLIDWGLAEFYHPGKEYNVRVASRYFKGPELLVDLQDYDYSLDMWSLGCMFAGMIFRKEPFFYGHDNHDQLVKIAKVLGTDELNAYLNKYHLELDPQLDALVGRHSRKPWSKFINADNQHLVSPEAIDFLDKLLRYDHQDRLTAREAMAHPYFSQVRAAESSRMRTQ

SEQ ID NO: 281118 - protein, 338 aa, Glycine max
  Clone ID: PAT_MRT3847_95872C.1.pep
MSIITRRGIRYMPRLDAAKVSAALLEKGQNRVIDASLTLIRERAKLKGELVRALGGAKATSTLLGVPLGHNSSFLQGPAFAPPRIREAIWCGSTNSTTEEGKELQDARVLTDVGDVPIQEIRDCGVDDHRLMNVIGESVKLVMEEDPLCPLVLGGDHSISFPVIRAVSEKLGGPVDVLHLDAHPDNYDAFEGNIYSHASSFARVMEGDYVRRLLQVGIRSITAEGRAQAKKFGVEQYEMRTFSRDRPFLENLKLGEGVKGVYISIDVDCLDPAFAPGVSHIEPGGLSFRDVLNILHNLQGAVVAGDVVEFNPQRDTVDGMTAMVAAKLVRELAAKISK

SEQ ID NO: 281119 - protein, 266 aa, Glycine max
  unsure (1)..(266): unsure at all Xaa locations
  Clone ID: PAT_MRT3847_95873C.1.pep
MSKARVYTDVNGRGPKEYWDYESLTVQWGDQDDYEVVRKVGRGKYSEVFEGINVNSNERCIIKILKPVKKKKIKREIKILQNLCGGPNIVKLLDIVRDQHSKTPSLIFEYVNSTDFKVLYPTLTDYDIRYYIYRPLKVTXSFNLSWYTLTGALCPLHNVYIGVSLSWTRLISILHLVHVYRHLLMHHGNYFTFAQICVKDPFLLLECFSFELQAIDYCHSQGIMHRDVKPHNVMIDHELRKLRLIDWGLAEFYHPGKEYNVRVASR

SEQ ID NO: 281120 - protein, 152 aa, Glycine max
  Clone ID: PAT_MRT3847_95874C.1.pep
MAEKQLIVAVESTAAMGPYWNTILMDYLDKMIRCFGGNDSTGQKFSASNVEFALVTYNTHGCYSSCLVQRSGWTRDPDVFFSWLSSIPFNGGGFNDAAIAEGLSEALMMLWNSQSRAPNQQILSMHKHYIHLAAIIPDCLQTPVYVPRPQNL

SEQ ID NO: 281121 - protein, 65 aa, Glycine max
  Clone ID: PAT_MRT3847_95875C.1.pep
VAGLLTRPQALSSGGFGPILYLGLQIFIMGGGDEFIHGEPIMVDIFWRPNFVLQHEPLKFTPGGA

SEQ ID NO: 281122 - protein, 126 aa, Glycine max
  Clone ID: PAT_MRT3847_95876C.1.pep
MAAPAEIEPPRKAFRWAARDSSGPPPPPHLSSLEGGATPPPPPPPPQTPPPRGPRGAPPPPHPPPSPPPTPPPPPPPPPPPPSPPPSRPPPPPPPPPPLSPPPPPHPSSSSTPSPPPPPPPPIPPP

SEQ ID NO: 281123 - protein, 41 aa, Glycine max
  Clone ID: PAT_MRT3847_95877C.1.pep
FFFFILGSHHTLGRGDHSYQSYSSHCHTKRTIPNISNHLTQ

SEQ ID NO: 281124 - protein, 262 aa, Glycine max
  unsure (1)..(262): unsure at all Xaa locations
  Clone ID: PAT_MRT3847_95878C.1.pep
GSSGSSGSSGSSGSSGSRDDQRLLXVYEFMTRGSLENHLFRRTVPLPWSNRIKIALGAAKGLAFLHNGPEPVIYRDFKTSNILLDXGPQGDKTHVSTRVVGTYGYAAPEYVMTGHLTAKSDVYSFGVVLLEILTGRRSMDKKRPSGEQNLVTWARPYLADKRKLFQLVDPRLELNYSLKGVQKISQLAYNCLTRDPKSRPNMDEVMKALTPLQDFNDLAILSYHSRLSQQGRRKKKDGTPQITYTQSKSMRASPLNTGKQHR

SEQ ID NO: 281125 - protein, 65 aa, Glycine max
  Clone ID: PAT_MRT3847_95879C.1.pep
ASVYRDPVPYSLGENVHQSALILSVSKNRMLLTVLNLMTVLHITGTPVEVGVIGGRKTRHELKYT

SEQ ID NO: 281126 - protein, 93 aa, Glycine max
  Clone ID: PAT_MRT3847_9587C.1.pep
KYPQAGGVSSKIVGEVNIKLAPLFPGGENLAFYLEKAPGSFVFGGPPTQKRGPPPPGQGPSFFIGEKGLPLGGAWHKAFAFSNPSFSKNLAPL

SEQ ID NO: 281127 - protein, 149 aa, Glycine max
  Clone ID: PAT_MRT3847_95880C.1.pep
ENEKKKCGCWAVLKRGVRATETRDLNASNRELCPPNEARLSSDNPDPPSQENKVPCQLLQFTFQELKAATGNFRPDSILGEGGFGYVFKGWIEEDGTAPAKPGSGITVAVKSLKPDGLQGHREWVAEVDFLGQLHHPNLVKLIGYCIED

SEQ ID NO: 281128 - protein, 116 aa, Glycine max
  Clone ID: PAT_MRT3847_95881C.1.pep
EQNLVTWARPYLAAKRKLFQLVDPRLELNYSLKGVQKISQLAYNCLSRDPKSRPNMDEVMKALTPLQDFNDLAILSYHSRLSQQGRRKKKDGTPQITYTQSKSMRASPLNTGKQHR

SEQ ID NO: 281129 - protein, 325 aa, Glycine max
  unsure (1)..(325): unsure at all Xaa locations
  Clone ID: PAT_MRT3847_95882C.1.pep
MNMKVVVVSMENEKKKCGCWAVLKRGVRGACKPSSASRDSPNTIPRTSLVYDAATETRYLNASNRELCPPNEARLSSDNPDPPSQENKVPCQLLQFTFQELKAATGNFRPDSILGEGGFGYGSRLEIEEDGTAPSKPGSWITVAVKSLKPDGLQGHREWVAEVDFLGQLHHPNLVKLIGYCIEDDQRLLVYEFMTRGSLENHLFRRTVPLPWSNRIKIALGAAKGLAFLHNGPEPVIYRDFKTSNILLDTEYNAKLSDFGLAKAGPQGDKTHVSTXVVGTYGYAAPEYVMTGHLTAKSDVYSFGVVLLEILTGRRSMDKKRPSGE

SEQ ID NO: 281130 - protein, 54 aa, Glycine max
  Clone ID: PAT_MRT3847_95883C.1.pep
VIASNKLFVNSICSFFLIIRWLPSPHRRDDDHPIQKTKQNKGLDQIHFVSEHNN

SEQ ID NO: 281131 - protein, 99 aa, Glycine max
  Clone ID: PAT_MRT3847_95884C.1.pep
RKKGGNSFKDSGNTRVEKKKGHRENHRHKFWYGRRSSPKFFFSRPKEKNLKLTGVKVPFPSDYKGAVEGPFAGNARGRGGPPPPKNGAPTGKGTVGTPP

SEQ ID NO: 281132 - protein, 89 aa, Glycine max
  unsure (1)..(89): unsure at all Xaa locations
  Clone ID: PAT_MRT3847_95885C.1.pep
ASLDQAPPGDVKSSDXIFTTKCAQCHTVEKCAGCNARPNLXNGLFGRQICTTPGYSYSSXNNNMAVTWEEKTLYDYFLSPIKFIPERKM

SEQ ID NO: 281133 - protein, 50 aa, Glycine max
  Clone ID: PAT_MRT3847_95886C.1.pep
RAPFREFLVSVIYLLSLSNDSSSLSSRPKDASWSYLYGNNTTLSVTSLNP

SEQ ID NO: 281134 - protein, 50 aa, Glycine max
  unsure (1)..(50): unsure at all Xaa locations
  Clone ID: PAT_MRT3847_95887C.1.pep
FSFTSSVVNTRVYWYETPIAHVXKVLLPIFTYHDVLVELQYQIMLHVIVQ

SEQ ID NO: 281135 - protein, 44 aa, Glycine max
  Clone ID: PAT_MRT3847_95888C.1.pep
KYSLHSPSTRTLPFYVCMSAIFSNLESFDFPIMVGMDVIPIHNS

SEQ ID NO: 281136 - protein, 78 aa, Glycine max
  Clone ID: PAT_MRT3847_95889C.1.pep
SSRIGSSTAARRRQKGMFYPKKKKKKKKKRGPPIRDPVTPEIIPGPEPEGEQLSPKESRLRLGVNQGQRVSLWEIFTR

SEQ ID NO: 281137 - protein, 481 aa, Glycine max
  Clone ID: PAT_MRT3847_9588C.1.pep
MLIGTLPQGQTDMHPQVSTLKHPLIKQMYQALLMIIFCLHQVAGMFYAVPENYVHQPSNSNYDRQAFSAADGGIIDLTMVHGRGPQKRKIPGIPPVCERGSTSRYFNATNAADRPTSSELWPEKPNMDSLYMPWDHVNMTPTFRGRGLSIRGEGPLRNVRSRSALDLESNLARTHLSNTHPHNSYSTGLPIDHSNMVDLSTQTSGTLTRDWSPMSICPPHGRVSSSDANAFNHEASHFLIGSSSSNAPVDVGGFHNEFGTSRNPTAPQSFHNNLTQTARGVHSNYSQRSTPTFRASSSLRLGRVAPSDDGLHMVSESYSSRQPRPLTTVGWQNNNRNGRSRIPSDRYRSLDDEGFMIVDRTSLYGPRNMLDRHRDMRMDIDNMSYEELLALGERIGHVSTGLSEDLISKYLTETIYCSSEQSQEEEACAICLEEYKNMDDVGTLKACGHDYHVGCIRKWLSMKKVCPICKASALPEDKKGK

SEQ ID NO: 281138 - protein, 124 aa, Glycine max
  unsure (1)..(124): unsure at all Xaa locations
  Clone ID: PAT_MRT3847_95890C.1.pep
KXXXIGXXXVXGKRXXXXIXGXXXXXXKXXXXGXXKKKXWXXXKYXGEXXXXXXXXLXXXXXXEXXXXXXXXXXXXIILNXERXKEKERKXGEXKEXEXEKXSEGDGEXGXRXSGLXXWXDCXG

SEQ ID NO: 281139 - protein, 77 aa, Glycine max
  unsure (1)..(77): unsure at all Xaa locations
  Clone ID: PAT_MRT3847_95891C.1.pep
PPVKTTHNHNFKGKIQDKEGIPPDXRRLIFARKQLEDGKDLADYNIQKESTLQLVLMLRGGINEPSLMGLTPKYNQD

SEQ ID NO: 281140 - protein, 182 aa, Glycine max
  Clone ID: PAT_MRT3847_95892C.1.pep
MDHQEDESNSKQDDEEAVARLEEIKKSIEAKLALRQSNLNPERPDSGFLRTLDSSIKRNTAVIKKLKQINEEQREALMDELRSVNLSKFVSEAVAAICDAKLRSSDIQAAVQICSLLHQRYKDFAPSLVQGLLKVFSPGKPGDESDTDRNLKAMKKRSSLKLLLELFFVGVIERWWHFLSIS

SEQ ID NO: 281141 - protein, 77 aa, Glycine max
  unsure (1)..(77): unsure at all Xaa locations
  Clone ID: PAT_MRT3847_95893C.1.pep
SVANTRSFAVVVILFLLLQFFAPFIGFVNRIRIFFVILMCNLASFFRCSGIFTTNLTXKIKKIWRWIHTTKFGLGFS

SEQ ID NO: 281142 - protein, 127 aa, Glycine max
  unsure (1)..(127): unsure at all Xaa locations
  Clone ID: PAT_MRT3847_95894C.1.pep
IFAGSAALFNFELYSGLSVFVGYIVVHTQEIVQRAHLSDMFYVKQAXTVWTHLVAVFVRILVIILDNWVHRSYKAHCRMVYLFPQYVQFSLVLPGCVIVPSAVDPVCVHLLSWPLLCSSSSLPPSYQ

SEQ ID NO: 281143 - protein, 67 aa, Glycine max
  Clone ID: PAT_MRT3847_95895C.1.pep
RSDHLEPLRCLPSPMYNRAQGLYIADAMSKIVTILLITVASSSVRSSRPLVVPHRASWSTTTKRTAQ

SEQ ID NO: 281144 - protein, 83 aa, Glycine max
  unsure (1)..(83): unsure at all Xaa locations
  Clone ID: PAT_MRT3847_95896C.1.pep
IYCQHSPRLTAILSNFICVNAETKALLNANKXGCHHWSHRERSNHRGVRLRFLACGSRKTIPNSNPCALPFTTIATPMPSPTM

SEQ ID NO: 281145 - protein, 66 aa, Glycine max
  Clone ID: PAT_MRT3847_95897C.1.pep
VLFYNNHYNSRDFYSEHWTFPLLIYFLIQLLILIKTETLSLTFNQKAIYPLQHLFSTFSTTFSNPP

SEQ ID NO: 281146 - protein, 68 aa, Glycine max
  Clone ID: PAT_MRT3847_95898C.1.pep
MSKSLPYSTKDVHYDNAKFRPRSFFKVVTQNLLTSNLRRDCGSCSQESFYFCIDFGVAYLMHGTCQFE

SEQ ID NO: 281147 - protein, 76 aa, Glycine max
  Clone ID: PAT_MRT3847_95899C.1.pep
HDDCRWGFWRLKAKRPHRLIVFRMEEQQRRVIGEKLVGPAQGYEDLIASLPADRGRNAVYDLGFLPEGNVLKGRIF

SEQ ID NO: 281148 - protein, 107 aa, Glycine max
  Clone ID: PAT_MRT3847_9589C.1.pep
MAQRNVTANSSFERTSLPSLDQKLAMAKRCSHEGVMAGAKAAVVATIATAIPTLASVRMLPWARANLNHSAQALIISTVAGAAYFIVADKTVLATARKNSFNRPSNA

SEQ ID NO: 281149 - protein, 89 aa, Glycine max
  Clone ID: PAT_MRT3847_958C.1.pep
PAAAPSGFSHSPGAFPCGGAMEGPPPPPFFSFIKRVGGVVPPRKKEPQKLVVSFFTQKGPPYIFLLTMGGFSPHPPRVHRGPQQKSPPI

SEQ ID NO: 281150 - protein, 29 aa, Glycine max
  Clone ID: PAT_MRT3847_95900C.1.pep
IRCEKCAQGVQQANPHDSRSIVSGDKLGK

SEQ ID NO: 281151 - protein, 161 aa, Glycine max
  Clone ID: PAT_MRT3847_95901C.1.pep
PTRPLPSSTMSLYGQDSSLSGVHSSALGRVGAPIVTTVIQTMQIPLSYAEDIIGIQGTNIEYIRRTSGAILTVQESRVPDEIVVEIKGTSSEVQTAQQLIQDVISSHKEPVTSSYGRLDAVPRSSYSHLGTTSRLPPSSLSSQPYTGYGASGLGDYSTFRL

SEQ ID NO: 281152 - protein, 95 aa, Glycine max
  Clone ID: PAT_MRT3847_95902C.1.pep
HSPRTMSKALGATTEEDEEDDQQHPQQDCFYDSHDRLLSLSSSCSCSNSNSDNENDTQDHQNDTSLPNFTNYDIWISQPSSVSERRTRLLLSLGL

SEQ ID NO: 281153 - protein, 347 aa, Glycine max
  Clone ID: PAT_MRT3847_95903C.1.pep
MATAEPLQNGTAEPLLPDNVSAAQPPTETESDAAAAASTPPEKRWPGWPGDCVFRLIVPVGKVGSIIGRKGELIKKMCEETRSRIRVLDAPLGTPDRIVLVSGKEEPEAALSPAMDAVVRIFKRVSGLSETDAENKESAAGLAFSSIRLLVASTQAINLIGKQGSLIKSIQENTSASVRVLSGDEVQFYATANERIVEIQGEALKVLKALEAVVGHLRKFLVDHSVLPLFEKTYNAPTSQDRQAETWSDKSLLHTTSRTSIFADIPHSTRPRTRGKRDSVLADRESQLDLFLPSSTMSLYGQDSSLSGVHSSALGRVGAPIVTTVSYINPSHVFCSLPFMKFTGEWD

SEQ ID NO: 281154 - protein, 314 aa, Glycine max
  Clone ID: PAT_MRT3847_95904C.1.pep
MNAFESHYYPYPVENPLQYVPINMVAQGYPREQYQEFQYFVVIDFEATCDKDKNPHPQEIIEFPSVIVSSITDQLEACFQTHVRPTCNQLLSDFCKDLTGIQQIQVDRGVTLSEALLRHDKWLEKKGIKNSNFAVVTWSNWDCRVMLESECRFKKIRKPPYFNRWINLRIPFREVFGAVKCNLKEAVEIAGLAWQGRAHCGLDDAKNTARLLALLMHRGFKFSITNSIMWQTADRPLMWKQSPEQPIVFPHCPYKAKDITTPVVQYHPFCFCGVKSSRGMVRKPGPKQGSLFFGCGNWTATRGARCHYFEWASN

SEQ ID NO: 281155 - protein, 414 aa, Glycine max
  Clone ID: PAT_MRT3847_95905C.1.pep
MMALENSENMQINCEASLKCLQSKGFPCNFQSNGNSMEGFTELKNEPGTHPAGDVADPNCHLGSEFLEPSNEFHTKPTYHQNYSTWTPCHFNSHKVQQCQMNAFESHYYPYPVENPLQYVPINMVAQGYPREQYQEFQYFVVIDFEATCDKDKNPHPQEIIEFPSVIVSSITGQLEACLQTYVRPTCNQLLTDFCKDLTGIQQIQVDRGVTLSEALLRHDKWLEKKGIKNSNFAVVTWSNWDCRVMLESECRFKKIRKPPYFNRWINLRIPFREVFGAVRCNLKEAVEIAGLAWQGRAHCGLDDAKNTAHLLALLMHRGFKFSITNSIMWQTADRPLMWKQSPEQPIVFPHSPYKAKDITIPVVQYHPFCFCGVKSSRGMVRKPCPKQGSLFFGCGNWTATRGAHCRYFEWASN

SEQ ID NO: 281156 - protein, 85 aa, Glycine max
  Clone ID: PAT_MRT3847_95906C.1.pep
GTAATTRRYGSAATTRQGAAQLILLIEITQYNVIRVHVLLLFDATGFIALQCHAYDLSPLRLSTGYASPTPEVHCSDSWRAVTPH

SEQ ID NO: 281157 - protein, 146 aa, Glycine max
  unsure (1)..(146): unsure at all Xaa locations
  Clone ID: PAT_MRT3847_95907C.1.pep
LVRLQGRVRSVPGRPHAVRERHFLFLRRGGVGLFSTTTTATACAVTLPKPSSLSLSSRGVLFPLSHAIVPPSTRVAGIRGGVNRAGDXAYSPRSSGAXSXSCSERPPTGRGPLFPGCDYNHWLIVMGNPGGEGANKQXMSECDIQT

SEQ ID NO: 281158 - protein, 57 aa, Glycine max
  Clone ID: PAT_MRT3847_95908C.1.pep
NYVCDCPFKRSHSGFPLKISGFGKVFPFFFLSTLKFPILPFAKFEMTNKSNISPSSV

SEQ ID NO: 281159 - protein, 64 aa, Glycine max
  Clone ID: PAT_MRT3847_95909C.1.pep
TINKFVNYKILQDVLTPDGGTLTLKNINWGAIQLDKRDLYYEILTTFCVKLLYELFLTNEQILP

SEQ ID NO: 281160 - protein, 184 aa, Glycine max
  Clone ID: PAT_MRT3847_9590C.1.pep
MTKKSQRRPVQYEKDKSGCMWGFINMFDFRHGHSTRKMIADKRQSSKHAVGVVHSKNKFEMLGNLDEVCHGSSGNGESRRPTVATAANKPSVKKLIEEEMFIDQNTMKDTYSAQIESKESRLRREVLLKLDTKRKKKSYRKNRDKEDTNDLNLDSTLKSKFTHNQHSRKQLKDNLDLDKMIEDF

SEQ ID NO: 281161 - protein, 84 aa, Glycine max
  Clone ID: PAT_MRT3847_95910C.1.pep
LHTISLSDLYVIYVESIYSGNLKFNEKVAYSENRINVGAIVKWIYGSAGSVEDYPDPRVFELSGQLQQFGMSYPRVRVGRAGYS

SEQ ID NO: 281162 - protein, 247 aa, Glycine max
  unsure (1)..(247): unsure at all Xaa locations
  Clone ID: PAT_MRT3847_95911C.1.pep
MSSPSKRREMDLMKLMMSDYKVEMINDGMQEFYVQFHGPNDSPYHGGVWKVRVELPDAYPYKSPSIGFINKIYHPNVDEMSGSVCLDVINQTWSPMFDLVNVFEVFLPQLLLYPNPSDPLNGEAAALMMRDRATYEQRVKGGTLERAYCEKYAKPEDIGAATEENSSDEELSEDEYXSSDXQVAGKAAPSLACMFLFFSSSYLCMMFCHVISSMKCLGCGRGNSPSWVGFPVIMYPDLLMLFLITLV

SEQ ID NO: 281163 - protein, 183 aa, Glycine max
  Clone ID: PAT_MRT3847_95912C.1.pep
MSSPSKRREMDLMKLMMSDYKVEMINDGMQEFYVQFHGPNDSPYHGGVWKVRVELPDAYPYKSPSIGFINKIYHPNVDEMSGSVCLDVINQTWSPMFDLVNVFEVFLPQLLLYPNPSDPLNGEAAALMMRDRPSYEQRVKEYCEKYAKPEDIGEATEEKSSDEEMSEDEYDSSDEQVVGKADP

SEQ ID NO: 281164 - protein, 86 aa, Glycine max
  Clone ID: PAT_MRT3847_95913C.1.pep
RSEENHLRKILVVSEGAGDSVALLGVIRLVQYLSQNHLLGKQRLMKFVVDAGTGTTAIGLGLAARCLGLPWEVYAVMLADKIDGYR

SEQ ID NO: 281165 - protein, 70 aa, Glycine max
  Clone ID: PAT_MRT3847_95914C.1.pep
GAGCFFCPGITYGVCDIRSCPCYSCAFLFLGIAARDSLGRPGFCCFFRNYPQRDVSSLSLCRVLVPYINA

SEQ ID NO: 281166 - protein, 188 aa, Glycine max
  unsure (1)..(188): unsure at all Xaa locations
  Clone ID: PAT_MRT3847_95915C.1.pep
MSSPSKRREMDLMKLMMSDYKVEMINDGMQEFYVQFHGPNDSPYHGGVWKVRVELPDAYPYKSPSIGFINKIYHPNVDEMSGSVCLDVINQTWSPMFDLVNVFEVFLPQLLLYPNPSDPLNXEAAALMMRDRPSYEQRXXEYCEKYAKPEDIGEATERESSDEEMSEDEYDSSDEQGVGKSRPLALHA

SEQ ID NO: 281167 - protein, 666 aa, Glycine max
  unsure (1)..(666): unsure at all Xaa locations
  Clone ID: PAT_MRT3847_95916C.1.pep
MAKPSSADGRTRSSVQIFIVVGLCCFFYILGAWQRSGFGKGDSIALEITKTNTECNIVPNLSFDSHHGGEVNEFDEADSKPKVFEPCAARYTDYTPCQDQKRAMTFPRENMVYRERHCPPEEEKLQCMIPAPKGYVTPFPWPKSRDYVPYANAPYKSLTVEKAIQNWIQYEGNVFKFPGGGTQFPQGADKYIDQIASVIPITNGTVRTALDTGCGVASWGAYLWSRNVIAMSFAPRDNHEAQVQFALERGVPAIVGVLGSIKLPYPSRAFDMAHCSRCLIPWGANNGIYMMEVDRVLRPGGYWVLSGPPINWKANYKSWLRPKEELEEEQRKIEETAKQLCWEKRSEKAEMAIWQKVVDSESCQRRKDDSSVEFCESSDADDVWYKKMEACITPTPKVTGGNLKPFPSRLYAIPPRIASGLVPGVSSETYQDDNKKWKKHVKAYKKTNRLLDSGRYRNIMDMNAGLGSFAAAIHSSKLWVMNVVPTIAEANTLGVIYERGLIGIYHDWCEAFSTYPRTYDLIHAHGVFSLYKDKCKAEDILLEMDRILRPEGAVIFRDEVDXLIKVKKIVGGMRWDTKMVDHEDGPXLVPEKVLVAVKQYLVTNSIINTISHNIKVEELAWPLAASTFLYTIFHRIHIVAQLVIAMLQLVAQKRGLMEYLHDCHLP

SEQ ID NO: 281168 - protein, 183 aa, Glycine max
  Clone ID: PAT_MRT3847_95917C.1.pep
MSSPSKRREMDLMKLMMSDYKVEMINDGMQEFYVHFHGPNESPYHGGVWKVRVELPDAYPYKSPSIGFINKIYHPNVDEMSGSVCLDVINQTWSPMFDLVNVFEVFLPQLLLYPNPSDPLNGEAAALMMRDRATYEQRVKEYCEKYAKPEDIGAATEENSSDEELSEDEYDSSDEQVAGKADP

SEQ ID NO: 281169 - protein, 70 aa, Glycine max
  Clone ID: PAT_MRT3847_95918C.1.pep
GKPFFNKSKNFKRPPVETGPSGSLNSDNQKQKGGPPTCNFAFIYPKKRKAPFKAHLFLGLGEQVYSRFFQ

SEQ ID NO: 281170 - protein, 79 aa, Glycine max
  unsure (1)..(79): unsure at all Xaa locations
  Clone ID: PAT_MRT3847_95919C.1.pep
KKVGLHPIEPLSVVKVRQIKVNDPLVGISXKGVGSKDQGEPNVFVILPGKHHQIRLDAQVGKMIIKISHVFAPWKELFF

SEQ ID NO: 281171 - protein, 76 aa, Glycine max
  unsure (1)..(76): unsure at all Xaa locations
  Clone ID: PAT_MRT3847_9591C.1.pep
CTDSDKMPVLYENCRVLDLDQTITNAPDRISILLDALRSGHPDKXLLLADIEQEAVESXVVNKLXGSLGIASLERP

SEQ ID NO: 281172 - protein, 67 aa, Glycine max
  Clone ID: PAT_MRT3847_95920C.1.pep
GSPGVQRKVRFLDWLVPGHGIPRLPVVLQRPVDCIPAPLKQVQAVGALCNFLCDAGPASVCVPLSSS

SEQ ID NO: 281173 - protein, 46 aa, Glycine max
  Clone ID: PAT_MRT3847_95921C.1.pep
RLVNQPTSFSLSLTLFYYVSKPHGHDHHGGGWGLIISPSSSFLIFL

SEQ ID NO: 281174 - protein, 46 aa, Glycine max
  Clone ID: PAT_MRT3847_95922C.1.pep
GTSWGQCNQRCMYQCVTVNYAWMDVELRLNWDFMQMFEVQSVKLGS

SEQ ID NO: 281175 - protein, 36 aa, Glycine max
  Clone ID: PAT_MRT3847_95923C.1.pep
NNLHTEALTSKPFHTHIVLMIRKKSKSYKEELIEIS

SEQ ID NO: 281176 - protein, 127 aa, Glycine max
  Clone ID: PAT_MRT3847_95924C.1.pep
PNHIPNPLVGSPDKPPPPEPPGEIFYLRKLIPPSLAYALHTPPMGFPPGEFLNVKGAPYTPPGFLPLEGPALFRLGDSWAPPPAGDALWRAPLPPPWYAPLGKPKPRFFLSKTPTQTPPYPPLMAPP

SEQ ID NO: 281177 - protein, 77 aa, Glycine max
  Clone ID: PAT_MRT3847_95925C.1.pep
MGLTNFVLTVAGVSAVVLLLRSDVRQSASVFRRNVKHIRNWLEEETAATSKTMEKSTPKEFESKVPPKDIPKEDKKH

SEQ ID NO: 281178 - protein, 53 aa, Glycine max
  Clone ID: PAT_MRT3847_95926C.1.pep
WHLQHIVSICSSCSHSASSLPRDRATYVPTVCTRRHVRNGSVFERGHEIGDLD

SEQ ID NO: 281179 - protein, 232 aa, Glycine max
  Clone ID: PAT_MRT3847_95927C.1.pep
ALFFFFFDGYVHKHTSFKEFVDKYDLVLHRKHLKEAMADLETRNVSFELKTGGNFEVQLAKVYTKEIFQKFQSEVEGMYSCFNTRQVSVNGSIITYVVKERVEVEGNEKGVKSFEVLYETTELDIRCICSLFNYKGYLCRHALNVLNYNGIEEIPSRYILHRWRRDFKQMFNQFHVYDNVDSHNPVPLYTRLFNSALPVLEVGAQSREHYMVALKELEELLGKFDIEDYNIM

SEQ ID NO: 281180 - protein, 175 aa, Glycine max
  Clone ID: PAT_MRT3847_95928C.1.pep
MGNTSSMLTQYDIEEVQQHCKNAFTQQEIVSLYQRFCQLDRNNCGFIPSDEFLSIPEFAVNPLSQSLLRMLDGLNFKEFVAFLSAFSPRATLHHKIEFIFKVYDTDCNGKVTFHDMLRALRDLSGPFMSEQQREDVLTQVLEEAGYAKDSSLVLSDFMKILGNSGLKMEVEVPVD

SEQ ID NO: 281181 - protein, 133 aa, Glycine max
  Clone ID: PAT_MRT3847_95929C.1.pep
MSWSGGDWMCGVCEHINFKKREACQSCGYPKYGGPDPSTYRYNRTEALPGDWFCNCGAHNYANRSSCYRCGSMKDDYSSGYGNNSGGYGSDTFPPGWKTGDWLCPRHGCGVHNYASRTECYKCKMPRDYGGAD

SEQ ID NO: 281182 - protein, 73 aa, Glycine max
  Clone ID: PAT_MRT3847_9592C.1.pep
MDLRSRPSHQVGRTFRLSASRYMSDIDDQMPTAIDPFADANADHSGTGSHDYVHIHVQLRCGRMSLTTVHGLT

SEQ ID NO: 281183 - protein, 128 aa, Glycine max
  unsure (1)..(128): unsure at all Xaa locations
  Clone ID: PAT_MRT3847_95930C.1.pep
TTNRNFIVKPHLSAGMLISNETEDLCDDNFEGSNEERQIFSEVFSGNGIFQSNQKCLVPVAISFEHESAKNTFKSFCSSNENSVVLHPSSSRLTHPEEEDXYVIQHSKEAALXCVPREFICEDQMTRM

SEQ ID NO: 281184 - protein, 141 aa, Glycine max
  unsure (1)..(141): unsure at all Xaa locations
  Clone ID: PAT_MRT3847_95931C.1.pep
PTCYGSARPKEEKVTGRRTXDQPKTRGDTMRPKGXKHEDRQKEKNKARPNRKKRDRXRGEXGINPYSMEWTGWANRLLRKGNDILCCDNASNDGLITKQVMSKRAEMINSLCGGDEKLMRERTHLLLASCSRRATRKKDAR

SEQ ID NO: 281185 - protein, 188 aa, Glycine max
  unsure (1)..(188): unsure at all Xaa locations
  Clone ID: PAT_MRT3847_95932C.1.pep
MMRRTNANDARADNNTLDTINAAAFAIASAQNRVSQPSTQKKRWGSWLGKIGCFGYKKTRKRIGHAVLVPEPTTNGADPAAAASSIQAPSITLPFVAPPSSPASFFQSEPPSTAQSPIGKVSHTCVSACIYSPGAPPSSSAIGPYAHETQLVSPPVXSASSTAPFTPPXXSVHMTTPSSPEVPFAQLL

SEQ ID NO: 281186 - protein, 63 aa, Glycine max
  Clone ID: PAT_MRT3847_95933C.1.pep
PFIGIAVAAPYAVLDTLCQKLKTGVKLYISASAHRQRWMPNRIKQWLQHMPLILLCSRSFDSL

SEQ ID NO: 281187 - protein, 99 aa, Glycine max
  unsure (1)..(99): unsure at all Xaa locations
  Clone ID: PAT_MRT3847_95934C.1.pep
PPDATVDRARASVTAALTGLKAMAALRPRKATADITXLLGSLYDQQCMQVWPPVGKRSIGTMFXLAYLQHAQSAKEAQNLIKWAWIYSLESEITHALPY

SEQ ID NO: 281188 - protein, 135 aa, Glycine max
  Clone ID: PAT_MRT3847_95935C.1.pep
IIPKLGVLVCIDHFGCPDLSKLKWDQGAYFVPYLLRGFPSLMNLLQGGLTWVKISAPYRFSKDEKLRDMDVLAREFIREAPTRVVYATDWPHTRFRNVDIEPFTEMCLRRCGSWAVAKRVFRYNTEELMDCRLNI

SEQ ID NO: 281189 - protein, 202 aa, Glycine max
  Clone ID: PAT_MRT3847_95936C.1.pep
QIIKHDDKECLDPSSTKKARVVWSVDLHQKFVKAVNQIGFDKVGPKKILDLMNVPWLTRENVASHLQKYRLYLSRIQKENDQRSSSSGLKHSDFPLKDMRSFGFQNSVNNQQQNDVAIDSYNHSDGSLLLQNVETKSHEADPKGIVSQSTIAKKGRILTGNIADTNMRESLRVGLNQTFAPLESEENHAVFDCSMPTPYTWT

SEQ ID NO: 281190 - protein, 369 aa, Glycine max
  Clone ID: PAT_MRT3847_95937C.1.pep
RERKGSADMYYNNQFVMLHDLLRELSICQSKEKPFEQRERLIIDLNGDNRPEWWIGQDEQGVIGRMSSFFLRMLYRQKQLRVAARILSISTDETFTSDWCDMLPDEAEVLVLNLNSSQYSLPEFTEKMSKLRVLLVTNYGFHRSELNKFELLGSLFNLKRIRLEKVSVPSLCILKNLQKLSLHMCNTRQAFENCSIQISDAMPNLVEMSIDYCNDLVKLPDGMSNITPLKKLSITNCHRLSTLPQDIAKLENLEVLRLCSCSGLVEMPDSVKGLYKLSCLDISDCVSLSRLPDDIGELKKLEKLYLKGCSKLSEFPYSVVNFGNLEHEIYVICDEEIAALWENFPTMPKLKIEISTMEINLNWLPGVHS

SEQ ID NO: 281191 - protein, 506 aa, Glycine max
  Clone ID: PAT_MRT3847_95938C.1.pep
DMDGFKLLEHVGLEMDLPVIMMSVDGETSKVMKGVQHGACDYLLKPIRMKELRNIWQHVFRKKIHEAKEFESFESIHLMRNGSELSDDGNLFAVEDVTSSKKRKDADSKHDDKECLDPSSTKKARVVWSVDLHQKFVKAVNQIGFDKVGPKKILDLMNVPWLTRENVASHLQKYRLYLSRIQKENDQRSSSSGMKHSDFPSKDMGSFGFQNSVIKQQNDVAIDNYNHSDGSLQLQNVETKSHEADPKGIVSQSTIAKKGRILTGNIADTNMRESLRVGLNQTFPPLESEGNHAVFDCSMPTPYSWTEVPHMQLKEEHKSLVYLEDSFNQLPLHGKQQQHIHVDQSQSVASISSAPSITEEEAAACIEPKPLFADYNNDYASSVSSTGNAVATFPIQPGSLIMNGQSSERISTTTSGLKTQEYNNLSSISDQEIYQRNLLGCEAASASLDEDLHFYWLEGECYNNMNFGLQNIGMSEYYDPGLISEAPIHLYDSADYSVMDQGLFIA

SEQ ID NO: 281192 - protein, 204 aa, Glycine max
  Clone ID: PAT_MRT3847_95939C.1.pep
GSIDRSQYSCSHASAHASAHASAHASVNLEMKTPQNDTKETAEINTNDTEKQEEVPASQAKEKIGIEDDGKFDQEKAKGIEEATKEQLPEEEVKTALPTAAFVQGDTDQIPQQQTLPDDDSEVIGIGSSIDTPEIEIGGRSTVVEEPEQPENMDNISVVKEEQADHQSEESSVSNVSTKHTTAEGHDTSESSTWNTNDVQTIPC

SEQ ID NO: 281193 - protein, 50 aa, Glycine max
  Clone ID: PAT_MRT3847_9593C.1.pep
KTGIIIFYSRNISVRTTMLCTGGDCLITNTAPAQAFFHQTAFKGWSWGAM

SEQ ID NO: 281194 - protein, 51 aa, Glycine max
  Clone ID: PAT_MRT3847_95940C.1.pep
YLYIRLYYALILYYCYNITGLYYKNWTLEVFHYNLTWAYSVLHLYGTIMRL

SEQ ID NO: 281195 - protein, 89 aa, Glycine max
  unsure (1)..(89): unsure at all Xaa locations
  Clone ID: PAT_MRT3847_95941C.1.pep
SFNNFSDLSGGDADPSTRFGDYNGHETAPCFGFFDPTSALRLLCIGAGYGTPNSGVXVCFIDKTRPALVVXTIVAVSMSGVMGMYVIMT

SEQ ID NO: 281196 - protein, 56 aa, Glycine max
  Clone ID: PAT_MRT3847_95942C.1.pep
LLCPRRNQCTCFWWVLFVFNWKLLPTLVDTNIISKACLQCSFNLIDTIYATRFNYA

SEQ ID NO: 281197 - protein, 44 aa, Glycine max
  Clone ID: PAT_MRT3847_95943C.1.pep
FSAALGSVLLVVSSIEYALADASYITDIRAARQSHAERKSQHIY

SEQ ID NO: 281198 - protein, 78 aa, Glycine max
  unsure (1)..(78): unsure at all Xaa locations
  Clone ID: PAT_MRT3847_95944C.1.pep
MWRIQPPCKKWCEIMIAVXIPPLGVCIRHGCNSVEFFICLLLTIIGYTRGIIXALYAIIFGDRDQYFDEYRRPLYAQY

SEQ ID NO: 281199 - protein, 67 aa, Glycine max
  unsure (1)..(67): unsure at all Xaa locations
  Clone ID: PAT_MRT3847_95945C.1.pep
MINPPKPKENHKELSENAICGPPVKNQSAXKFLFHKYISXLNLPKSFSMQFPNVKYNLINFEISISP

SEQ ID NO: 281200 - protein, 93 aa, Glycine max
  unsure (1)..(93): unsure at all Xaa locations
  Clone ID: PAT_MRT3847_95946C.1.pep
MNHQWCWDVQNSPIDTCQLVQYLQLTRCCCSGGVGPIPRTTGLRMLAARSXKDLSRECLCTPIRSMVRGYXEAMPPLDKGSWAGWSIKIYKFN

SEQ ID NO: 281201 - protein, 114 aa, Glycine max
  Clone ID: PAT_MRT3847_95947C.1.pep
MVLHSWISSSHILVNFLLLLGCGITYGTDTDIFCLKSIKESLEDPYNYLKFSWDFNNKTEGYICRFNGVECWHPDENRVLNLKLSNMGLKGQIPRRIHNCSSLTGLDRSINKLL

SEQ ID NO: 281202 - protein, 58 aa, Glycine max
  Clone ID: PAT_MRT3847_95948C.1.pep
IYPASSSRKGRGVGDALSTCYAAGEIIKIAAIMNGLMLVGVAIGLVLLRVDAFVEDSE

SEQ ID NO: 281203 - protein, 58 aa, Glycine max
  Clone ID: PAT_MRT3847_95949C.1.pep
HFYSASHVKFSRRTKARHNASAESDTALKSMQKLSRPNDGPNGLFRGLQKTMTALVNN

SEQ ID NO: 281204 - protein, 78 aa, Glycine max
  Clone ID: PAT_MRT3847_9594C.1.pep
EKNYRIDSNYTACSLGLTLKKTLRKPWVQNSSHIAEKHWHCPCIIVNCHLGFPNNTWPCSGYGHRSLGTLPNLQTGAS

SEQ ID NO: 281205 - protein, 94 aa, Glycine max
  unsure (1)..(94): unsure at all Xaa locations
  Clone ID: PAT_MRT3847_95950C.1.pep
RIAPKGLIFLXAVLCFXXLSLXRCLAEGNXLVMNFXKESCPQAEDIIREQVELLYXXHKSXXFSWLXXIFXHXCAVQSCXASXXLXSTXKSLSD

SEQ ID NO: 281206 - protein, 72 aa, Glycine max
  Clone ID: PAT_MRT3847_95951C.1.pep
FISRWKHISNGSIGLNPYSLYAYDSVWMIAEALKLFFDRNGTILFSNNTNLSGTRFQGHRVGMGLQVAETII

SEQ ID NO: 281207 - protein, 96 aa, Glycine max
  Clone ID: PAT_MRT3847_95952C.1.pep
RGPFFFPTKLLPGLRHPQGKGQLALTKGPECPIIRELIHALPKNCPKRGQLLMGKKPGSKVFFPQKTQKPEAPVPVNTPPGITPPCLFIQVNWLCA

SEQ ID NO: 281208 - protein, 77 aa, Glycine max
  Clone ID: PAT_MRT3847_95953C.1.pep
SIHKTLPSHHKLTNILVFPYIGIEKNPSFPQILKLCQKRIPIGIAKFSLKSYARFEMDLVQSPNSNSHTVLNQRKFF

SEQ ID NO: 281209 - protein, 65 aa, Glycine max
  Clone ID: PAT_MRT3847_95954C.1.pep
KPPLHTMLLIQTTNINKFILKLFTEPLFSYLFVTLPIFITIHSLKISFFFINQSQTQNTTLVNQP

SEQ ID NO: 281210 - protein, 53 aa, Glycine max
  Clone ID: PAT_MRT3847_95955C.1.pep
LFATSLDPTHNITQALMVNCVARPFLILELTTTTLYQSLNYFRVQKPLRFSCS

SEQ ID NO: 281211 - protein, 66 aa, Glycine max
  Clone ID: PAT_MRT3847_95956C.1.pep
SFLAGLAASGVLTSALRLVTKAAFENSKDGLRNGSNCYVYCVGFDWMLHSTLGLLQLELLCIVYGI

SEQ ID NO: 281212 - protein, 104 aa, Glycine max
  Clone ID: PAT_MRT3847_95957C.1.pep
VHNFWIPLYPLRKKDNNIGFIISFVKMITFMLTIEVHCTVLYSKFLFQIVELTDYLRWKKNKPACSSHIVPLIKLWLSTCYRIIVQMTACFDPILSTIVWFMFP

SEQ ID NO: 281213 - protein, 59 aa, Glycine max
  Clone ID: PAT_MRT3847_95958C.1.pep
SRLEPLIWCARPPYERVERESSLRALLPNCEGLYSMVTDRYKRLYYHLCKMMNPSLPHK

SEQ ID NO: 281214 - protein, 90 aa, Glycine max
  unsure (1)..(90): unsure at all Xaa locations
  Clone ID: PAT_MRT3847_95959C.1.pep
NIENPSDALAVDLKNKIHLVEIDLKWVRDQNPDDSIKERDEIVIQNLQPSKHLEXXSIGHYGGTKFPSWLSDXFISNVVSLRLTDCKYCL

SEQ ID NO: 281215 - protein, 40 aa, Glycine max
  Clone ID: PAT_MRT3847_9595C.1.pep
KDEFHHFTSLTLICLNNPSHQLHHSASTSKHQRTHSSANS

SEQ ID NO: 281216 - protein, 163 aa, Glycine max
  Clone ID: PAT_MRT3847_95960C.1.pep
MSALEWWLVYHPSIQKFSWKPPHTPFSSPLFLSLSILSYLSLTLLLTLLPLPPFPHRLLKPITALHNLLLLLLSLLMLLGCSLTLLIHTPHLRWAVCFPPHTNPTGPLFFWAYIFYLSKILEFLDTLFIVLSRSFRRLSFLHVYHHATVLLMCYLWLQTSQSL

SEQ ID NO: 281217 - protein, 85 aa, Glycine max
  Clone ID: PAT_MRT3847_95961C.1.pep
KKNDRKSVSKEVAVENELEHVAPSVSLSVLTRHLNCVLCVWPYCIYCAHAERKVTALETVENKIGKQAGLNSFAGNCFTALQWSF

SEQ ID NO: 281218 - protein, 41 aa, Glycine max
  unsure (1)..(41): unsure at all Xaa locations
  Clone ID: PAT_MRT3847_95962C.1.pep
TGGASCFHFLSQKSLIMNTRKDMDRIKGPWSPEEDEXSADS

SEQ ID NO: 281219 - protein, 58 aa, Glycine max
  Clone ID: PAT_MRT3847_95963C.1.pep
LELLHIIRSLQIPLPSVSNVKVHYHVNCTPFLGKCQPYEVTPQHPAPESNLNYLDLFL

SEQ ID NO: 281220 - protein, 419 aa, Glycine max
  unsure (1)..(419): unsure at all Xaa locations
  Clone ID: PAT_MRT3847_95964C.1.pep
IASSGFLHFANVSVGTPPLWFLVALDTGSDLFWLPCDCISCVQSGLKTRTGKILKFNTYDPDKSSTSNKVSCNNNTFCRQRQQCPSAGSTCRYQIDYLSNDTSSRGIXVEDVLHLITDDDQTKDADTRIAFGCGQVQTGVFLNGAAPNGLFGLGLDNISVPSILAKEGLISNSFSMCFGPDGAGRITFGDTGSPDQRKTPFNVRKLHPTYNITITQIIVEDSVADLEFHAIFDSGTSFTYINDPAYTRLGEMYNSKVKANRHSSQSPDSNIPFEYCYDISINQTIEVPFLNLTMKGGDDYYVMDPIVQVFSEEEGDLLCLGIQKSDSVNIIGQNFMIGYKIVFDRDNMNLGWKETNCSDDVLSNTSPINTPSPSPAVSPAIAVNPVATSNPSINPPNRSFRIKPTFTFVVVLLPLIAIF

SEQ ID NO: 281221 - protein, 127 aa, Glycine max
  unsure (1)..(127): unsure at all Xaa locations
  Clone ID: PAT_MRT3847_95965C.1.pep
LICCSCGQVQTGVFLNGAAPNGLFGLGLDNISVPSILAKEGLISNSFSMCFGPDGAGRITFGDTGSPDQRKTPFNVRKLHPTYNITITXNCCGRXXADXEFHAIFDSGTSFTYINDPAYTRLGEMGK

SEQ ID NO: 281222 - protein, 106 aa, Glycine max
  Clone ID: PAT_MRT3847_95966C.1.pep
CNSYSIIIITSLSLYLFSFIKIFLWQILKFNTYDLDKSSTSNEVSCNNSTFCRQRQQCPSAGSTCRYQVDYLSNDTSSRGFVVEDVLHLITDDDQTKDADTRIAFG

SEQ ID NO: 281223 - protein, 136 aa, Glycine max
  Clone ID: PAT_MRT3847_95967C.1.pep
MGFALSFGSLPVLVSSYDFATPNKEIQWLGSVFTGIIFCVVGYGKLSSAEKIEWNNRGFSTFHALFASFTSFYLLVLSDIFNKDSHEELVINRSSTFSNSVLGISIGYFLADLAMILWHFPALGGLGLRFTPWVVH

SEQ ID NO: 281224 - protein, 273 aa, Glycine max
  Clone ID: PAT_MRT3847_95968C.1.pep
MGFALSFGSLPVLVSSYDFATPNKEIQWLGSVFTGIIFCVVVYRLTAILSSLLFKGYGKLSSAEKIEWNNRGFSTFHALFASFTSFYLLVLSDIFNKDSHEELVINRSSTFSNSVLGISIGYFLADLAMILWHFPALGGLEYVLHHGLSMFSIIQSLLCGQGQIYILMVLFSESTTPFVNLRWHLDIADLKSSKLYVWNGIALFFGWLIARIFLFMFFFIHMWTHFDEVKEIYPLGFYSLLVVPPVLAMMNLFWFWKIAKGLVKTISKAKHSI

SEQ ID NO: 281225 - protein, 165 aa, Glycine max
  Clone ID: PAT_MRT3847_95969C.1.pep
SVLSLSDQLDKFSEYKNKIKETVGENRMATIISKSIYVLCTGSNDIANTYSLSPVRRAHYDVPEYTDLMASQATNFLQELYGLGARRIGVIGLPVLGCVPSQRTIQGGILRSCSDFENQAAMLFNSKLSSQTDALNKNFPEARFVYLDIYNPLLNMIQNPSTYGF

SEQ ID NO: 281226 - protein, 82 aa, Glycine max
  Clone ID: PAT_MRT3847_9596C.1.pep
MGFRLPGIRKASKAADAPKGYLAVYVGEKLKRFVIPVSYLNQPSFQDLLSQAEEEFGYDHPMGGLTIPCSEDVFQRITSCLN

SEQ ID NO: 281227 - protein, 214 aa, Glycine max
  Clone ID: PAT_MRT3847_95970C.1.pep
MASSPLNSKSGSHGRSNSLPSRPHPLILKCNEHLESLRASNETSSSLSNLRHKVGGLQDLIECVEKLIQLPLTQDVFLHECQENWVDELLDGSLRLLDVCTSAKEALLHTKECTRELQSIIRRKRGGEVELTAEVKKFLTSRKVVKKAISKALANLNSISKSCNFSSTADKDHRTVALISLLQDVEVVTLSTFQTLLQFISGSTRSKSNNWLSI

SEQ ID NO: 281228 - protein, 138 aa, Glycine max
  Clone ID: PAT_MRT3847_95971C.1.pep
MMASSTVLFTLVAALFVTSVVAQSPASSPALSPKRTPVLATPQKSPSPAISPSAVSPSSSPPAPTVNAPSPSPTSVDSPPSPPLSPSDSPAGVPSVTPSAISSPPSEAPAPSQNGAALNRFTVAGSAAVVVFAAALLM

SEQ ID NO: 281229 - protein, 69 aa, Glycine max
  Clone ID: PAT_MRT3847_95972C.1.pep
KYDGNTWFVVLYLKANQALKDMGKAALDIMTYDADQAGYGYVEDLDRNTILILAYRPIQMETIDDTTRV

SEQ ID NO: 281230 - protein, 44 aa, Glycine max
  Clone ID: PAT_MRT3847_95973C.1.pep
PDGQTIVTGAGDETLRFWNVFPSRKSQNTESEIGASSFGRTIIR

SEQ ID NO: 281231 - protein, 81 aa, Glycine max
  unsure (1)..(81): unsure at all Xaa locations
  Clone ID: PAT_MRT3847_95974C.1.pep
WPAGFMSHPTDNELVWQFLRRKVVCCPLTIFIIPEVDVCKFDPWDISGDIESEXFSICTEDAGYIIGNRSNIAPYYWQTIA

SEQ ID NO: 281232 - protein, 38 aa, Glycine max
  Clone ID: PAT_MRT3847_95975C.1.pep
AELLGGRLFQSIRVAEASKSAALDSWALGSEAHFLSQP

SEQ ID NO: 281233 - protein, 589 aa, Glycine max
  Clone ID: PAT_MRT3847_95976C.1.pep
MKSSLILLFMICGGVIATPPEDPIRCSSKNTDCTITNTYGVFPDRSICHAGEVMYPNTEEELISAVASASKNKRKVKAATRFSHSIPKLVCPDGENGLLISTKNLNKILKIDKEARTMTVQSGVSLREIISKGAEAGLALPYTPYWWGLTIGGLMGTGAHGSTLWGKGSAVHEYVGELRILTPAERLEGYAKVRNLDESHQQHLNAARVSLGVLGVISQVTLKLEPLFKRSLTYLTKDDSDLGDELVTFGRKHEFADVTWYPSQQKAVYRIDDRVSINKSGNGLYDFFPFRPTLSAALTVVRATEELQEATRDANGKCVGAKLITATLSGIGYGLSNNDDKGIFLGYPIVGFSNRMQASGTCLDSLNDGLITACPWDSRIKGEFFHQTAFSIPLSAVKNFIEDVQKLVELEPKSLCGLETANGILMRYVTASSAYLGKSEDAVDFDITYYRSKDPLAPRLFQDILEEIEQIGLFKYGGLPHWGKNRNLAFLGAIKKYHNADKFLKVKEEYDPQGLFSSLWTDQMLGLQEGVTILKDGCAMEGMCICSQDSHCAPKKGYFCRPGRIYKEARVCTRDVKKTKEADDVKDEL

SEQ ID NO: 281234 - protein, 78 aa, Glycine max
  Clone ID: PAT_MRT3847_95977C.1.pep
SHEPAATATSSAVTVARLPYFSATTNIQKAHCAIPNTNLSMSVQAREAFIQCNEKSQSSSDTDTTISDTLNEYSYASF

SEQ ID NO: 281235 - protein, 56 aa, Glycine max
  Clone ID: PAT_MRT3847_95978C.1.pep
GIVTRLAGLWLVHFGRLDSGCAQSTYWPKCRCRPRYNSMARSIDGLPSCSRGWCLC

SEQ ID NO: 281236 - protein, 71 aa, Glycine max
  Clone ID: PAT_MRT3847_95979C.1.pep
GPICRLEFPLWWLTMLSAEILTRTTSQTCYSGVLLRKIDHHYSETYDGSACLVTGLLKDDRTEHMEHVADV

SEQ ID NO: 281237 - protein, 82 aa, Glycine max
  Clone ID: PAT_MRT3847_9597C.1.pep
MGFRLPGIRKASNAVDAPKGYLAVYVGEKMKRFVIPVSYMNQPSFQDLLTQAEEEFGYNHPMGGLTIPCSEEVFQRITCCLN

SEQ ID NO: 281238 - protein, 40 aa, Glycine max
  Clone ID: PAT_MRT3847_95980C.1.pep
PSDMGGSGISHVRSLHSSGASTQHQFSSGYMFQTVRMSFL

SEQ ID NO: 281239 - protein, 95 aa, Glycine max
  unsure (1)..(95): unsure at all Xaa locations
  Clone ID: PAT_MRT3847_95981C.1.pep
MVHHTMTHSHSLQQRFDDIFTAHRNQILALTFMLEAHAKGILPHTQVASEAEKVPEDSRQNXPKGGFGEPLRLPQEATVLSPLATIAVEPRPVVW

SEQ ID NO: 281240 - protein, 133 aa, Glycine max
  Clone ID: PAT_MRT3847_95982C.1.pep
NSARESAKPLSQNLWPRKTQKQISDPMLKFVQELHGDLELVYVGQVCLSWEILCWQHKRVQVLKQCDSQWPRSYNLVAGDFQLFQVLMQRFLEDEPFQGPRIRNYVKNRCLIRNLLQVPVIKDDNTKDKKIIK

SEQ ID NO: 281241 - protein, 59 aa, Glycine max
  Clone ID: PAT_MRT3847_95983C.1.pep
QSIMITIDDSIGFHYDSLVSVSGDQKLSSMIGFLCPRCSSSSGLYLRVVNFHSSLYRSS

SEQ ID NO: 281242 - protein, 57 aa, Glycine max
  Clone ID: PAT_MRT3847_95984C.1.pep
KKKITISQGELHFLRGKNPLIIFYKEILNFLGGKQPHTMLPCFTFLIQKINLRNLID

SEQ ID NO: 281243 - protein, 125 aa, Glycine max
  Clone ID: PAT_MRT3847_95985C.1.pep
MPNPKCEACGKTAYPLESVTALEKTFHKGCFKCTTCKTTLNLKNFKGYEGQIYCIPHTPTPKATAVTDSVLIKAAVNAPKKKAEGLAIAHRGARELAPAAADFTVNDTNVDQSTENQPDQSHIQY

SEQ ID NO: 281244 - protein, 122 aa, Glycine max
  unsure (1)..(122): unsure at all Xaa locations
  Clone ID: PAT_MRT3847_95986C.1.pep
VPAFRLSAGVGVGNAVVLEIAMTFCLTFTVYPTADDPNTGNLGIIATVAIGVIAGANIXLRGAFYGAAMNPAATFVPAVMSWTWTNHWIYXASPIIRGGIAGLMYDVVFMSHTHEHLTSTDY

SEQ ID NO: 281245 - protein, 86 aa, Glycine max
  Clone ID: PAT_MRT3847_95987C.1.pep
EAEATKELYSFNHLIEGIASMASGVKFSFFIALFIVLVAVGAAHEGHDHMAPAEPPSNHASSLKNHAVVGGLFPLLLTLLIARERL

SEQ ID NO: 281246 - protein, 85 aa, Glycine max
  Clone ID: PAT_MRT3847_95988C.1.pep
EKHKLMKRRNMDQMKITALSIFLLGCLLVMAVQGDSSARVLPVEVGNINKLGVSSQKEPFMRTGAGHHMRKQGLGGKKFSTNEVT

SEQ ID NO: 281247 - protein, 62 aa, Glycine max
  Clone ID: PAT_MRT3847_95989C.1.pep
IREGKVISHETNLILLFLVRTLERSCHVFVYCLLALFLFVVTITENNQVLAVNFYEYKYGLY

SEQ ID NO: 281248 - protein, 87 aa, Glycine max
  Clone ID: PAT_MRT3847_9598C.1.pep
MRGSQGGGCIRRPGCASLIPYVEPDVQAQSAEAHSDSIPVEADSQEGVAHIGEPTSGAYRPLPTKTNSVETPTEWQLDLPRDKIPKC

SEQ ID NO: 281249 - protein, 59 aa, Glycine max
  Clone ID: PAT_MRT3847_95990C.1.pep
GIVQSALNVLLSFIIFDEKLLNRAAFLNEFFQSLSYLVQFQSITSLEVILYLQVVPISY

SEQ ID NO: 281250 - protein, 68 aa, Glycine max
  Clone ID: PAT_MRT3847_95991C.1.pep
HQSKFLLMFLSLLPTSPMHGYWRSIILVLALNTYDSVIPPKTSVSIYVPTSTNLFSFAPWPNPPSVVR

SEQ ID NO: 281251 - protein, 56 aa, Glycine max
  Clone ID: PAT_MRT3847_95992C.1.pep
GFISPFILANAPCKPTSLFYFYLQQRENKGIKNCKEKKKIHSFLYFRLRVIYLDIS

SEQ ID NO: 281252 - protein, 322 aa, Glycine max
  unsure (1)..(322): unsure at all Xaa locations
  Clone ID: PAT_MRT3847_95993C.1.pep
MSSAARTPGGEEGKHYPAPLAPHEGVVKDSTLFWDTLRRFHFVMGTKFMIPVIGGKELDLHVLYVEVTRRSGYEKVVAEKKWREVGSVFKFAATTTSASFVLRKHYFSLLYHYEQVHFFKARGPIYTPSADAFSGNSPSWRPELAIVEYSPKPMDNSPESRAEDTSCLSGNGTIEGKFDCGYLVSVKLGSEVLRGVLYHPEQXGSSPSIPNMRVPXVPINRKPHRSGRRKKNKRRWDPNYPKPNRSGYNFFFAEKHYTLKTLYPNREREFTKMIGQSWNSLSPEERMVYQNIGLRDKERYKRELTEYKEKMKLRQTSEVGRP

SEQ ID NO: 281253 - protein, 69 aa, Glycine max
  Clone ID: PAT_MRT3847_95994C.1.pep
ASDHTPFVHAVLYHRNVSESRLAERVRSIVHMYNAPCSRSAIMEAPRIIYLQLTCSKQSVPISSSLIYL

SEQ ID NO: 281254 - protein, 86 aa, Glycine max
  unsure (1)..(86): unsure at all Xaa locations
  Clone ID: PAT_MRT3847_95995C.1.pep
ESACLGTXKRVXTIPCVDDTEGIDNNMSDDQKNDRSILSKTPRFLNNLQKLESAXFLTRCKSAYSSGKLAVQHSPIGTDERTVSIK

SEQ ID NO: 281255 - protein, 70 aa, Glycine max
  Clone ID: PAT_MRT3847_95996C.1.pep
PIEAYIIYLLGHAASTWIRLFAWKCLIIFMSRCLSFYYLSRGVIYQEHGQWQTTYSYLSLANAFKYPHLT

SEQ ID NO: 281256 - protein, 60 aa, Glycine max
  Clone ID: PAT_MRT3847_95997C.1.pep
FLTQTLSLNPIWIKLHYILFYSVFFFLFFFLLCFDVVFFTCNLSSLFYVKSILGFYCFCL

SEQ ID NO: 281257 - protein, 176 aa, Glycine max
  unsure (1)..(176): unsure at all Xaa locations
  Clone ID: PAT_MRT3847_95998C.1.pep
FELVGIPPAPRGMPQIEXVTFDIDANGIVTVSAKDKSTGKEQQITIRSSGGLSEDEIDKMVKEAELHAQKDQERKALIDIRNSADTSIYSIEKSLGEYRDKIPSEVAKEIEDAVSDLRTAMAGDNADEIKAKLDAANKAVSKIGEHISGGSSGGSSAGGSQGGEQAPEAEYEEVKK

SEQ ID NO: 281258 - protein, 90 aa, Glycine max
  Clone ID: PAT_MRT3847_95999C.1.pep
VKKGSPFLGFLHVIIDLPEKQVQCCRVRSMLFPREAKASKKFRPDSKALRVKSHACQEDNFFRAKKKRRNNSLRYFKKERSLGFKVRRGG

SEQ ID NO: 281259 - protein, 56 aa, Glycine max
  Clone ID: PAT_MRT3847_9599C.1.pep
PHRKLLSMQLLAANQFCTITMQIVLLSIIQQISWPYCCPGAPNKLVKFLEIPARSA

SEQ ID NO: 281260 - protein, 604 aa, Glycine max
  unsure (1)..(604): unsure at all Xaa locations
  Clone ID: PAT_MRT3847_959C.1.pep
ARGNTLSLILSWAEKRLLAYHHTFHNGNIESMESVISLAVLSAKILEDISHDYNRKKKDDVDYTRVGNYIRSSLRTVFIKKLEKLDLCKHPSRKQNKAFPILSVLARDIIELAINEKAIFSPKLKRWHPLATGVAVATLHVCYGNELKKYVKGINELTPDAIEVLIAADKLEKDLVQIAVEDSVDSEDGGKSIIREMQPYEAEAVIATLVKSWINIRVDRLGEWVDRNVRQEVWNPGENKEGFAPSAVEVLRMIDDTLEAFFLLPIPMHADLLSGLMSGLDKSLQQYILKATSGCGSRSSFIPTLPALTRCSTTSKMXVFKKKEKSQVTQRRKAHVGTTIGDNSIDITQMCVRINTMQRIRMELGVLEKRIVANLSSSRSTNADIANGVSLKFKLSASAAVEGIHQLCECIAYKIVFHELWHVIWDGLYVGEVASARIEPFLQELEQYLEIVSSTVHDKVRTRVIVKVMQASFDGFLLVLLAGGPSRAFSLQDSVIIEEDFKFLTGLFWSNGDGLPAELIEKHSTTVKGVLPLFRADTEHIIQQFSQLTMEMYGSTAKSRLPLPPTADQWSPTEPNTLLRVLCNRNDEAAAKFLKKNYNLPKKL

SEQ ID NO: 281261 - protein, 66 aa, Glycine max
  Clone ID: PAT_MRT3847_95C.1.pep
KQQLWACLSSRFHGSKSRLQKNLPGNLCVKSGLKKRQPKKGLFFNFFIFPTALPSSYNDQACYALF

SEQ ID NO: 281262 - protein, 60 aa, Glycine max
  Clone ID: PAT_MRT3847_96000C.1.pep
KKKKQTKISQSNSSCHNVLYGERVSWKLTPERGQCTPDSASARKMLPPQRQPLRDPAVTP

SEQ ID NO: 281263 - protein, 282 aa, Glycine max
  Clone ID: PAT_MRT3847_96001C.1.pep
MSAFDVSGVSRPRADVNLLQSETEGIDDEKIGFYGRCTLHIIEPRCLPIYDPLDEIGSQEEKEFTCARAEGYKGRRWDGFQNNQCQGGCLVPEEQLNAWIHINGQKLCSRGLPKFPDLDIEHDCRKEYARYKQAKGWKHLVVYKSRIHALGLYTSRFISRGEMVVEYIGEIVGLRVADKREKEYQSGRKLQYKTACYFFRIDKEHIIDATRKGGIARFVNHSCLPNCVAKVITVRHEKKVVFLAERDIFPGEEITYDYHFNHEDEGKIPCYCNSKNCRRYMN

SEQ ID NO: 281264 - protein, 171 aa, Glycine max
  Clone ID: PAT_MRT3847_96002C.1.pep
MKSFNINGTTLSVALYTDVTNSKELLESMQAGTLEPEVAFLNALLIPDIFPVLAAAHKTLVAKSRDSLTTRTLHSELVYNYSGSKHITESLKRCGISDSTTCILAARFDASPDEIKAIGKLINGKEIDLEELEGRANQSQIQKIYKISSSELGVSSLADAITCRIAARDAL

SEQ ID NO: 281265 - protein, 150 aa, Glycine max
  Clone ID: PAT_MRT3847_96003C.1.pep
MSEGENPAVTRFRDYLRIKTVQPNPDYESCTNWLLDQAKEIGLSSQVFEYVKGKPIVLLTWIGRDPELPAILLNSHTDVVPVFEEKWAHDPFEAFKGENGDIFARGAQDMKCAGASYLEAIRCLKDQDKQPCRTIHLSYVPDEEIGVVME

SEQ ID NO: 281266 - protein, 83 aa, Glycine max
  Clone ID: PAT_MRT3847_96004C.1.pep
YMCKVVIGAFVISVPNYKFCCFDFCKVFSLIESNFLKFVCFILESVYNSCMAIFLRLIMWWLVRSVFVFVSLLIIKKEILIMK

SEQ ID NO: 281267 - protein, 73 aa, Glycine max
  Clone ID: PAT_MRT3847_96005C.1.pep
GGAICGRRKATNHKSREMRIQRECTFVTHVYLPSTVQFLLQKVKSHANTMDAVGPTLPSKTSVVSSDLHTRAP

SEQ ID NO: 281268 - protein, 387 aa, Glycine max
  unsure (1)..(387): unsure at all Xaa locations
  Clone ID: PAT_MRT3847_96006C.1.pep
MELSAIKDAFDRITIKQKLSCSKTQEAIDLIKQEIESVLDTLQSVNNTDHELDYKTVLNELKASLLKIAPLSQMEGTQKELNLALTKYGKLHEKHFNPDISKAYRNVDIDIHTLNQIIANHFYRQGLFEIGDQFYECGMESXESAAIMKSPFLEMYQILEAMQNLNLEPALNWAATNGDNLXQSGSDIVLKLNSMQFVKILQNGSREEALHYARTHLSPFATSHMTDIQKLMGCLLWTGKLDRSPYHALLSASNWDKLAEELKRQFCNLLGQSYNSPLSVTVAAGVQVLPPLLKFMNVMAGKKHEWQSMNQLPVLVELDREFQFHSIFVCPVSKEQATEDNPPMLMSCGHVLCKQSILKMSKNSTKMFKCPYCPFDIDAAQCKQLYF

SEQ ID NO: 281269 - protein, 122 aa, Glycine max
  Clone ID: PAT_MRT3847_96007C.1.pep
MELSTIKDAFDRVTKKQKLSCSKTQEAIDQIRQEIESVLDTLQSANNTDHELDYKTVLNELKASFLLIAPLSQMEGTQKELNVALTKYGKLLEKHFNPDISKAYRNIDIDRHTLNQIIANHF

SEQ ID NO: 281270 - protein, 87 aa, Glycine max
  Clone ID: PAT_MRT3847_96008C.1.pep
FSSAFNKLLHPLYLPILFFHSLLFPIIFLCVLIFFLFPRFVVSSSSSSSSSSSCCFFLLILTSLSSIFPLLGDRGFLCLDMGLGFFL

SEQ ID NO: 281271 - protein, 185 aa, Glycine max
  unsure (1)..(185): unsure at all Xaa locations
  Clone ID: PAT_MRT3847_96009C.1.pep
GSRLKEILWNVNSDDALQGMYKPIKLLYHPKDLFVLIRQPQRIIAVFPIRFKEKSDVIIATNFFQEFVDVGNSDKXAKVPPCNWSAIPPPELRGEAFEDLSTNGGFFIFDISSRRVEGNRLDKIVWNVXLLNFNAYVSYHVKSTKGFILRRMRKRLESYVRXLHXTNSEENEQTXTYQACRYTKK

SEQ ID NO: 281272 - protein, 35 aa, Glycine max
  Clone ID: PAT_MRT3847_9600C.1.pep
SFKLEGSLFTQVVHLNRLVIDHFSIHLLLTADGSS

SEQ ID NO: 281273 - protein, 135 aa, Glycine max
  Clone ID: PAT_MRT3847_96010C.1.pep
LCKERKEKHTMSNTGCFFEKTSLPWKKNTRRSSRNKLGRSCKFRLPWWSELSPIEFLKDIADKVTKAICLRSARKSSNRGSSSMGRSKPIGVSVDYYKTSPVEDCIEFIHSFFSISNSVTATPGEEFPHIHLRIF

SEQ ID NO: 281274 - protein, 50 aa, Glycine max
  Clone ID: PAT_MRT3847_96011C.1.pep
GSTHASARAYNRSERETQWGTLLRHTNLRNYTTAYVVENGKCPSSRTEGW

SEQ ID NO: 281275 - protein, 38 aa, Glycine max
  Clone ID: PAT_MRT3847_96012C.1.pep
NMLFASLLLFPRSQSSSPSISCVSMTKFTNASSVCARA

SEQ ID NO: 281276 - protein, 203 aa, Glycine max
  Clone ID: PAT_MRT3847_96013C.1.pep
DRKKHKYVEMKAIKGWAGQILHGLVYLHSHKPPIIHRDLKCDNIFVNGNQGEVKIGDLGLAIVMQQPTAQSVIGTPEFMAPELYEEAYTELVDIYSFGMCILEMVTLEYPYSECQNPAQIFKKVTSGIKPASLNKVSDPQLKDFIEKCLVPASERLSADELLKDPFLQVENPKDPILYPLQPPSRTLRAYSFKSGSLSMDMGF

SEQ ID NO: 281277 - protein, 86 aa, Glycine max
  Clone ID: PAT_MRT3847_96014C.1.pep
SFFFFFFFFFKTLQSNYLFRFMQTELACDHINYSSTIFFIPRDDMATIHFILYATHDLLTSRHHLCITPRKQTIKLNSKFRAITSS

SEQ ID NO: 281278 - protein, 34 aa, Glycine max
  Clone ID: PAT_MRT3847_96015C.1.pep
AIPSPQYKPVLTKSCKTNQRVYFLDTKIIIFLHY

SEQ ID NO: 281279 - protein, 36 aa, Glycine max
  Clone ID: PAT_MRT3847_96016C.1.pep
PPPSCCPEHQHSRHSVGAFQHQLRLHPRRWSGQDST

SEQ ID NO: 281280 - protein, 44 aa, Glycine max
  Clone ID: PAT_MRT3847_96017C.1.pep
CHPWLLSCSCKRKIMSSTQHSSALEITDANLHISHIQISPVLSN

SEQ ID NO: 281281 - protein, 94 aa, Glycine max
  unsure (1)..(94): unsure at all Xaa locations
  Clone ID: PAT_MRT3847_96018C.1.pep
RSRGFGFVPFPPENSIKDAIQGMTGQTLSGGNITVNEAQSPGTPGGSGGCRXGGYTPRGGGYGGGGFGGAKNCGSGAGGSPPSRGGDVNGTRGN

SEQ ID NO: 281282 - protein, 101 aa, Glycine max
  unsure (1)..(101): unsure at all Xaa locations
  Clone ID: PAT_MRT3847_96019C.1.pep
PAKSALFSFGMIIGVLLPGKDPPAPFFGKPPSGGSLGCWLNPFHQTGGAPEALNKTMLGEKGEENXMLMPVRIAAAPLFDMPPNRPFSDELVPMLTQLPSF

SEQ ID NO: 281283 - protein, 145 aa, Glycine max
  Clone ID: PAT_MRT3847_9601C.1.pep
YSSEENTSEQAHFQTGRPQDPGTDTYTKRQPKDAPHAANQSKRKEKKNSPRKGHSPFKEALEMGVEVYHHPKAAIKKKYGQEATNRGDEGGSAPNNQENQEGPELLKTAIAKAGYTGKDAIGTDAAAPETEDNKDQTHDLQSKEE

SEQ ID NO: 281284 - protein, 65 aa, Glycine max
  Clone ID: PAT_MRT3847_96020C.1.pep
KFLLFGQSARNLSPRTAAPERTHSRVHQTPGDNLLDFNSNLLQLQLRLLWLNPSPAVQTHLVCRL

SEQ ID NO: 281285 - protein, 38 aa, Glycine max
  Clone ID: PAT_MRT3847_96021C.1.pep
VTHLLNVSYIFSDSSMLLLLLFFLWKVLTNICRACIFY

SEQ ID NO: 281286 - protein, 550 aa, Glycine max
  Clone ID: PAT_MRT3847_96022C.1.pep
ARASPRMTSRNDAWTPSQSGIGEDIQGMDDLNLDDPNPAQDSSSSTQKVDERSKEQVEDFDLPDFEVVDKGVEVQEKEEDGGEEAEEPVQEESTSSEVVKEVVLDHVHLTRLSELDSIAQQIKALESMMGEDDKFTNVEEETEPQRLDADEETVTREFLQMLEDQDNSDYLFNQPEIPPLKLEGHEDASSEDGDSKVYLPDLGKGLGCVIQTRDGGYLASMNPLDIAVARKDAPKLAMQMSRPFVLASHQSLTGFELFQKLAGIGFDELSSKVLSLMPIDEMIGKTAEQVAFEGIANAIIQGRNKEGASSSAARIVSYLKSMGSAMSSGRRERITTGLWNVEEEPLTAEKLLAFAMQKVESMTVEALKIQADMAEELEAPFDISAKKGEGGKDLLASVIPLEEWIRDHSYAKTVAGSDGEPEKVTLVLVVQLRDPLRRYEAVGGPVMVLIHATSADTKGKEEEKRFKVTSMHVGGFKLTSAIKKNAWDSGKQRLTAMQWLVAYGLGKAGNKKGKQSLAKGQQDQLWSISSRIVADMWLKTMRNPDINLGK

SEQ ID NO: 281287 - protein, 96 aa, Glycine max
  unsure (1)..(96): unsure at all Xaa locations
  Clone ID: PAT_MRT3847_96023C.1.pep
THASNLIFFILLFFSYNSNIHYNRKPTIFIKSXHPHLSSFSLLHFLKILSNIIPNNITSTTKSLFSSKSTLFTIKSHISSTISNPFLNLSFLFTSF

SEQ ID NO: 281288 - protein, 67 aa, Glycine max
  Clone ID: PAT_MRT3847_96024C.1.pep
FCMSHSVVLLIKPMLLLQMMLWLTASSLALTPHHQTMYYYNLCPLIQCSSSLPNNPTMARPGHSCFT

SEQ ID NO: 281289 - protein, 60 aa, Glycine max
  unsure (1)..(60): unsure at all Xaa locations
  Clone ID: PAT_MRT3847_96025C.1.pep
AXKFARGSKQTNPPPNAFFNLPLRVFWVVWFRTFHRHRLSPPFSISILLSTINSPSLSFS

SEQ ID NO: 281290 - protein, 185 aa, Glycine max
  unsure (1)..(185): unsure at all Xaa locations
  Clone ID: PAT_MRT3847_96026C.1.pep
APKGSIFLAAFCFSALTLSLXLAEDNGLVLNFYKESCPQAEDIIKEQVXLLYKRHKNTAFSWLINIFHDCAVQSCDASLLLDSTPKSLSDKETNISFGLINFRYIETIKEALDRECPXVDSCADILILSAIDGIDTLGGPHIPLKTXRMDGRMSRADVVEQFLPDHNESISAVLDKFRAMGIDTP

SEQ ID NO: 281291 - protein, 53 aa, Glycine max
  Clone ID: PAT_MRT3847_96027C.1.pep
AAASALTDSQYLVIPQWPPVTRHSCAVRWLTTAARDQGGAVILVKRQDKVTNQ

SEQ ID NO: 281292 - protein, 334 aa, Glycine max
  unsure (1)..(334): unsure at all Xaa locations
  Clone ID: PAT_MRT3847_96028C.1.pep
MAPKGLIFLAVLCFSALSLSRCLAEDNGLVMNFYKESCPQAEDIIKEQVKLLYKRHKNTAFSWLRNIFHDCAVQSCDASLLLDSTRRSLSEKETDRSFGLRNFRYIETIKEALERECPGVVSCADILVLSARDGIVSLGGPHIPLKTGRRDGRRSRADVVEQFLPDHNESISAVLDKFGAMGIDTPGVVALLGAHSVGRTHCVKLGAXRLYPEIDPXLLNPXDHVPHILKKCPDAIPDPKAVQYVRNDRGTPMILDNNYYRNILDNKGLLIVDHQLANDKRTKPYVKKMAKSQDYFFKEFSRAITLLSENNPLTGTKGEIRKQCNAANKHHEEP

SEQ ID NO: 281293 - protein, 104 aa, Glycine max
  Clone ID: PAT_MRT3847_96029C.1.pep
MVKDKLKKHVLTAFTPNGDYVAILSANEVAKIWNTNTGHLLAEWKPSDGDHDIRYSCIACSFIGKKRRKEQGTCLLALGTIDGSVLAVDVSTGERKLTTSHSGG

SEQ ID NO: 281294 - protein, 69 aa, Glycine max
  Clone ID: PAT_MRT3847_9602C.1.pep
LNTPFTPLPTQAQSEQTTLWPPQTPTQTMTSPQEMPPENKLTSATTNDRSISLPKTPHKVPRLHSKNTE

SEQ ID NO: 281295 - protein, 79 aa, Glycine max
  Clone ID: PAT_MRT3847_96030C.1.pep
ELFSPFEEVSRLEQAPLYELLSVLVAQCRRVLHGLLSPPSASSDELVYIRPILAVHASQTKTESSISYPRDRTIKMLSA

SEQ ID NO: 281296 - protein, 102 aa, Glycine max
  unsure (1)..(102): unsure at all Xaa locations
  Clone ID: PAT_MRT3847_96031C.1.pep
MVRVRANTVSLPMALVPLLQWDDSWGEMIRDVDGNLVAHKTKXFPSGIKAVADYVHGKGLKLGIYSAAGYFTCANVMPGSLGYGEQDAKTFASWYAFKSRYE

SEQ ID NO: 281297 - protein, 515 aa, Glycine max
  Clone ID: PAT_MRT3847_96032C.1.pep
MAGTEAKKTESKKPAAKQSGAKKKEVKKETGLGLTHRKAENFGEWYSEVVVNAEMIEYYDISGCYILRPWSMAIWEIMQEFFDPEIKKMKIKNCYFPLFVSPGVLQKEKDHVEGFAPEVAWVTKSGESELEIPIAIRPTSETVMYPYYSKWIRGHRDLPLKLNQWCNVVRWEFSNPTPFIRSREFLWQEGHTAFATKDEADAEVLEILELYRRIYEEYLAVPVIKGKKSELEKFAGGLYTTSVEAFIPNTGRGIQGATSHCLGQNFAKMFEINFENEKGEKAMVWQNSWAYSTRTIGVMVMVHGDDKGLVLPPKVASVQVIVIPVPYKDADTQGIFDACSATVNTLNEAGIRAESDSRDNYSPGWKYSNWEMKGVPLRIEIGPKDLANKQVRAVRRDNGAKIDIASADLVVEIKKLLDTIQQNLFDVAKQKRDECIQIIHTWDEFVQALNQRKMILAPWCDEEEVEADVKARTKGEMGAAKTLCSPFDQPELPEGTKCFASGKPATKWTYWGRSY

SEQ ID NO: 281298 - protein, 130 aa, Glycine max
  unsure (1)..(130): unsure at all Xaa locations
  Clone ID: PAT_MRT3847_96033C.1.pep
AGIRAESDSRDNYSPGWKYSNWEMKGVPLRIEIGPKDLANKQVRTVRRDNGAKIDIASADLVVEIKKLLDTIQQNLFDVAKQKRDECIQIIHTWDEFVQALNQRKMILAPWCDEEXVEADVKARTKGEMG

SEQ ID NO: 281299 - protein, 92 aa, Glycine max
  Clone ID: PAT_MRT3847_96034C.1.pep
MVERELYGREIMNVIACEGSDRIERPETYKRWQVRNMKAGFKQLPLNEELMAKFRSKLKEYHRDFVLDENNNWMLQGWKGRILFASSCWVPA

SEQ ID NO: 281300 - protein, 416 aa, Glycine max
  Clone ID: PAT_MRT3847_96035C.1.pep
EIVCNERCSSQSETVKAVEPGGVKGLPNNRATYQETVDLRNLLMMCSQSVYANDIRAANELLKQIRQHSSPIGDASQRLAHYFANGLEARLVGDGTSTQGMYTFLSSKNNTFSELLKAYQVFSSSSPFKKFAYLFENTMIMKAAASAETVHIIDFGILHGFQWPMLIRLLSNREGGPPKLRITGIEFPQPGFRPTEKIEETGRHLANYCKRYNVPFEYNAISSRNWETIQLEALKIASNELVAVYCHQRFENLLDECTIEVNSPRNAVLHLIRKINPDIFTHSITNGSYNAPFFTTRFREALFHYSAISDKNDTVISRENERRLMVERELYGREIMNVIACEGSDRIERPETYKRWQVRNMKAGFKQLPLNEELMAKFRSKLKEYHRDFVLDENNNWMLQGWKGRILFASSCWVPA

SEQ ID NO: 281301 - protein, 165 aa, Glycine max
  unsure (1)..(165): unsure at all Xaa locations
  Clone ID: PAT_MRT3847_96036C.1.pep
ENDDTDRGITPAQCECTSVHADDPSQLINAEKLCASHAAATATAADKKDPHQHIHAIHLPIEPLPPLHDAMDDXIGXDQAGLIDATTSPMWIIXSSSQYPRLFIEQNSFPTGVTTCTHVTARXYAADPTEEHRIYRHXLASSLDQCAYPATDAFTPGPPLELPPI

SEQ ID NO: 281302 - protein, 257 aa, Glycine max
  Clone ID: PAT_MRT3847_96037C.1.pep
WIPRAAGEKHREKKHKKGKRDEEKKEKRDKEGRDGKRKEKKDKKEKHREKKKDKDKNRDKDKSKTSAAIEKDFPGQAQGPNAGKLHQKEIKPNDKKAILLEDKLTKQFASNNGEKVRENNHLAEENKDSKFLLELDKRIRDNDGGAENQLAQKFTTAGHRKNDGAVRLVTKGSDTWPDGKERLQDKGIDTRKVDRRGIWGESRPVGNATVQNNAGKFHPRVDEMPKSLENNIYKPLEATVEGKERRVKGKKDDKHGD

SEQ ID NO: 281303 - protein, 103 aa, Glycine max
  Clone ID: PAT_MRT3847_96038C.1.pep
FKLLLFLSPKLALLRKFVNPKSLTPRCGETKPVCWLSKGTPQYPSPKSLVYEKVFFLFPFEGGAPLPQQRELDRVIFCFSPLSVGEGVHHIERGKVHGACCFP

SEQ ID NO: 281304 - protein, 103 aa, Glycine max
  Clone ID: PAT_MRT3847_96039C.1.pep
EIEHQPQGATLKCSYRWINQFIVFYSRQEKSRELVLRQGINQMLARQILPSVGGLGENPSSKSIEGAAPAFSVDLEESESDDRSSNGESGAGLLGLGDNVYCR

SEQ ID NO: 281305 - protein, 151 aa, Glycine max
  Clone ID: PAT_MRT3847_9603C.1.pep
ASKAELITNMSHSLSSTNVQEQEGMQNPFEFSEDKILDDVYRTHFDCFEKCDVTSLQTVASNVINHSIDISEKVISKGDQLREQFSEEINISSQQLTAKLRRIAYLMICTPRGEHFGHRTTMLILEQLKHYSWDAKVLIVQAAFSLEYGKI

SEQ ID NO: 281306 - protein, 64 aa, Glycine max
  Clone ID: PAT_MRT3847_96040C.1.pep
IPPKGFLNLVRETFFFGPGMFPLPLVFKGGGNTGFLKTAAMGPFGKRGPFFPWGVVNPLKGGGA

SEQ ID NO: 281307 - protein, 177 aa, Glycine max
  Clone ID: PAT_MRT3847_96041C.1.pep
MGSCLSVSGASASVDAFDESSSNSSSRTASDYNMEMRLHRVPGRLFLNCSSQVASLFCKQGRKGINQDAMLLWDNFSSNKDTVFCGVFDGHGPHGHMVAKKLRDSFPLKLIAQWNLLHPNNNSSSNNNSDTPCAVAPGNIGTLRDSFVKACKVMDRELKVQHQIDCSCSGSTGLTLL

SEQ ID NO: 281308 - protein, 79 aa, Glycine max
  Clone ID: PAT_MRT3847_96042C.1.pep
TKSIKFCEIKPSTTKFVYIMGIIKKYYSTSENQNEIGNQNRRMVFIFVPCGLQTYTSPKENNNAKCHQRGGSQRRLSAA

SEQ ID NO: 281309 - protein, 71 aa, Glycine max
  Clone ID: PAT_MRT3847_96043C.1.pep
GIRYMYQLVPLRSIRKHISKCRMDGIYFNNDINSSIVVRVRPSSFERDKSSLVFSFGLGFSFFCSFLKSLI

SEQ ID NO: 281310 - protein, 77 aa, Glycine max
  Clone ID: PAT_MRT3847_96044C.1.pep
IDKVSISIIKSFKCTCCCDCETKTPYLIDLQTQQNSGISYFEVVLLGGGGEWKLLIKGRKALLCVSGIQLLQLRLAR

SEQ ID NO: 281311 - protein, 1043 aa, Glycine max
  Clone ID: PAT_MRT3847_96045C.1.pep
MSSKERSQQPHSRVPRRQEWIRRDVGGCSNPRKPKKGSSSNSREESNLPQLLQEIQDKLVKGAVECMICYDMVRRSAPIWSCSGCFSIFHLTCIKKWARAPISVDLSVEKNQGGFNWRCPGCQSVQLTSSKDIRYLCFCGKRPDPPSDLYLMPHSCGEPCGKPLERDLQGDKELLCPHLCVLQCHPGPCPPCKAFAPPRLCPCGKKNITTRCSDRQSVLTCGQRCQKLLQCGRHRCQQICHLGPCHPCQVPINASCFCAQKMEVILCGEMAVKGEIRADGGVFSCGSTCQKKLNCGNHICIETCHPGSCGDCELLPSRIKTCCCGKTRLEEKRHSCLDPIPTCSQVCGKYLPCGIHHCEEPCHAGDCSPCLVLVSQKCRCGSTSRTVECCKTKMENEKFTCERPCGQKKNCGRHRCSERCCPLSNPNNILNADWDPHFCQLPCGKKLRCGQHACESLCHSGHCPPCLETIFTDLTCACGKTSIPPPLPCGTPPPSCQLPCSVPQPCWHPASHSCHFGDCPPCSMPIAKECIGGHVVLRNIPCGSKDIKCNKLCGKTRQCGLHACGRTCHLPPCDNLSAVPGIRASCGQTCGAPRRDCRHTCTAPCHPSTPCPDTRCKFPVTITCSCGRITENVPCDAGGSCANYDADTVHEASIIQKLPVLLQPVAANGKKVPLGQRKLMCNDDCAKLERKRVLADAFEITAPNLDSLHFGENSVASELLADMLRRDSKWVLSVEERCKFLVLGKSRGNAHGPKVHVFCPMLKDKRDAVRVIAERWKLAVNAAGREPKHFVVVHVTPKSRAPARVLGFKGTTTVNVPLPPAFDPLVDMDPRLVVSFIDLPMDADISALVLRFGGECELVWLNDKNALAVFNDPARAATAMRRLDHGTVYQGAVVVVVPNVGASVASSATNAWGGSGTMKGGALAALKSNPWKKDVIQEPGWREDAWGDEEWATGSANVKLPIQKKEARISASVNPWSVLNQESSSSSSVAAIKIDGSRKHSESSVITKLEPRDGGSNLGGQPAGNFDALEASDVVDDWEKACE

SEQ ID NO: 281312 - protein, 154 aa, Glycine max
  Clone ID: PAT_MRT3847_96046C.1.pep
MQGSPASSPASWLLQRACSAVTGPDRDGGICTLIIRRGPEARPLSHCSLPDIPILFAGASIMVNRLPGKSLLLLLALGAIAPVAQAADTPTLNTGSTAWMITAAVLVLFMCLPGLALFYGGLVRAKNMLSLFTQCFGVAGLVGVLWVIYGYSMV

SEQ ID NO: 281313 - protein, 38 aa, Glycine max
  unsure (1)..(38): unsure at all Xaa locations
  Clone ID: PAT_MRT3847_96047C.1.pep
HASEQESVQXSRDYQRGLPGLSFPNSLCTSLRNPQFIF

SEQ ID NO: 281314 - protein, 77 aa, Glycine max
  Clone ID: PAT_MRT3847_96048C.1.pep
TSCSPSYLNMRITLFVFMTTISMENHSYLKHVMHTLTCWDSSQQPSIDRLTWSTRPDNARHFGFNAKHGNLINVLVL

SEQ ID NO: 281315 - protein, 73 aa, Glycine max
  unsure (1)..(73): unsure at all Xaa locations
  Clone ID: PAT_MRT3847_96049C.1.pep
MAPSPRVASAFMAMSNLGIDESIGKPVLKKLLKLXRXNWALIEEESYWALADAIFDEEQIMVIEPDLNIKNKD

SEQ ID NO: 281316 - protein, 61 aa, Glycine max
  Clone ID: PAT_MRT3847_9604C.1.pep
ARITVSSTVSGTLSVDFEDFNFKLCTFGWCTWRIAQSMCCVIEPLYINMGDERIQSAVFLD

SEQ ID NO: 281317 - protein, 146 aa, Glycine max
  unsure (1)..(146): unsure at all Xaa locations
  Clone ID: PAT_MRT3847_96050C.1.pep
LSFDLAIEVLVELVTKHEGVPRILLCKVHYLKEVLLFPALSRGDIKVIGGLSCLLSEIGQAAPSLIVEASAEALALIDALLSCVAFTSEDWEIADSILQLWTTLASYILGIDEDDAESXKRVEDIFSTVISTLLDSLTLRSHVDDS

SEQ ID NO: 281318 - protein, 119 aa, Glycine max
  unsure (1)..(119): unsure at all Xaa locations
  Clone ID: PAT_MRT3847_96051C.1.pep
SLPTPFLHHTFSFNITDPSYCFLSDFLAXXFSPSIFYTSLSPIYLFKLLLYLHLSYNLITSNNQYKFFIYCVFLIPNXHLILSFLLFYLTNFIKYFPTHSLNFPFIYNYKHIFLFFSNH

SEQ ID NO: 281319 - protein, 74 aa, Glycine max
  Clone ID: PAT_MRT3847_96052C.1.pep
WVRKGERSGKWKTHRRVLQEEASYAHESAYVVLYAHILCLLALTHNLLVSLPMPKYLFFHHFPSCYFTVNQFTP

SEQ ID NO: 281320 - protein, 51 aa, Glycine max
  unsure (1)..(51): unsure at all Xaa locations
  Clone ID: PAT_MRT3847_96053C.1.pep
YLHKKLYINCFSEVTEIFFNIQTQNSNFSLTITQFKYFLKFXSSRIPSLRX

SEQ ID NO: 281321 - protein, 69 aa, Glycine max
  Clone ID: PAT_MRT3847_96054C.1.pep
DSRLFVCWLGCWDLCCSFLFLPLPLPLSIFSDTHTLRYTKAIIRVVDTKFSVSLYIWGHTYIGNGTVTF

SEQ ID NO: 281322 - protein, 199 aa, Glycine max
  unsure (1)..(199): unsure at all Xaa locations
  Clone ID: PAT_MRT3847_96055C.1.pep
MESLEERVFMFMDEQYYFSNSNESELHMHHHPSVSVENISWENNTDFDDSPERTLYWKSQIALLQEILERYHLSGSKLRREVGRIIKEVKASDFCSCLKANSWDCTTCLRRRVVDGLCRTGFSTNLCISKWETTKKFPGGCHEYIEVIANTSTMKKIHFLVELELKEQFQIAKAMXNTQNLESCLPRFYIGKPEYLTAI

SEQ ID NO: 281323 - protein, 336 aa, Glycine max
  Clone ID: PAT_MRT3847_96056C.1.pep
MARNLLLVLFAVATLLHGSAAQTRHMVGDATGWIIPAGGAATYTAWASNKTFTVNDTLVFNFATGQHNVAKVTKSAFDACNGGSAVFTLTSGPATVTLNETGEQYYICSVGSHCSAGQKLAINVNRASSTGPSPAPQPRGSGSPPRASPVPTQAPQASSPTPPPRSAPAPAFGPSSEPATFIVGETAGWIVPGNASFYTAWASGKNFRVGDVLVFNYASNTHNVEEVTKANFDACSSASPIATFTTPPARVTLNKSGQHFFICGIPGHCLGGQKLAINVTGSSTATPPSAAAPPTTPSSPSPAGAVTPPPQNSGAASLGVVGVFATLLSVAATFFY

SEQ ID NO: 281324 - protein, 77 aa, Glycine max
  Clone ID: PAT_MRT3847_96057C.1.pep
GKFFFFEYAPVGDSWGNSPRRPPSIRVFPPSGSPLFLLNIIFGPSFLLVPFGHVFPPPMWFFASSPFEGTRGGVVLF

SEQ ID NO: 281325 - protein, 104 aa, Glycine max
  Clone ID: PAT_MRT3847_96058C.1.pep
PIHFFKAKVAPLGGLKPKGTVWFPNFLRPFLGKKNFPFPLKKMGWILRPPRFWGSVYKKKNLVKIFLKKTKGPKKRDFSKVFFFFLKKLPGGPIKTVKKKGGQG

SEQ ID NO: 281326 - protein, 217 aa, Glycine max
  Clone ID: PAT_MRT3847_96059C.1.pep
RHQVMLVANAIDATFSKGDAIAIDMQMTVNAVIIYLAIVLAGCVVVSIADSFAPKEIATRLRVSKAKGIFTQDFISRGGRKFPLYSRVIEAAACKVIVLPVIGDDLGVQLRDCDISWKVFLSSSRQHPRSHHYSPIIQSIDTVTNILFSSGTTGEPKAIPWTQLSPIRSAADAWAFIDIQPGDVYCWPTNLGWVMGPTLIYSCFLSGATLALYHGSP

SEQ ID NO: 281327 - protein, 45 aa, Glycine max
  Clone ID: PAT_MRT3847_9605C.1.pep
FRKGYKNNEIKVVAVNDFHPASAAYEAIKHSFTLYAEYVVKSFSR

SEQ ID NO: 281328 - protein, 146 aa, Glycine max
  unsure (1)..(146): unsure at all Xaa locations
  Clone ID: PAT_MRT3847_96060C.1.pep
MDFQGFLNDLQDWELSRKDKTRAQKENKASKGDTISFDRARNSPGQYDLSRINDPFNRVHSSFVPEDVPDAVSEKDLGXEFFKQKKFKEARDCYSRSIALSPTAVAYANRAMANIKLRRFQEAEDDCTEALNLDDRYIKAYSRRAT

SEQ ID NO: 281329 - protein, 149 aa, Glycine max
  unsure (1)..(149): unsure at all Xaa locations
  Clone ID: PAT_MRT3847_96061C.1.pep
MATNALNSGVAHADTTEGHMEPLKKSQSXIVLTKITSIGTIHSIDLLINDLTAGDVRARVHSQHTHDIKGISHMEATVGISENTGVALACAMNRCFRRRASSDIDTICSQDCELWHAACTQAMTMAINRNPGSDAWSLEYXKRTGFHCD

SEQ ID NO: 281330 - protein, 74 aa, Glycine max
  Clone ID: PAT_MRT3847_96062C.1.pep
EKSFLTLALEMSQGCAQSDARLLLRRLKSLNPSQVQRPTGPIELSPQLLEWLAFAKLAGTKVALKIVTPTKPIK

SEQ ID NO: 281331 - protein, 85 aa, Glycine max
  Clone ID: PAT_MRT3847_96063C.1.pep
KGKHNRSEKKSRKAMLKLGMKPVGGIIRVTTTHNKNVLFVISKPDVFKSTDSETHGIGGEAKIEDLNAQAQALAAQQYKAPAAEA

SEQ ID NO: 281332 - protein, 73 aa, Glycine max
  Clone ID: PAT_MRT3847_96064C.1.pep
IKIFHPVKSRMLRLYDSKMASLSQFFCPVRPPRSPRGSKRPPSPRCASQKLFQVRMEMLTNGWYLETKLLSMF

SEQ ID NO: 281333 - protein, 152 aa, Glycine max
  unsure (1)..(152): unsure at all Xaa locations
  Clone ID: PAT_MRT3847_96065C.1.pep
MVNPRCFLDITIGGELEGRIVVELFHDVVPKTAENFRALCTGEKGIGPNTGVPLHYKGMCFHRVIKGFMIQGGDISAGDGTGGESIYGAKFEDENLEMKHERKGTXSMANAGPNTNGSQFFITTTRTPHLDGKHVVFGKSLKGMGIVRSVEH

SEQ ID NO: 281334 - protein, 123 aa, Glycine max
  Clone ID: PAT_MRT3847_96066C.1.pep
AFLGISGLVQFMPWNIVLPFLPMSASFSLHIGACLQLRALCWLVHFVYLPFCLVRFLITRFAASWVGESDFTWVYMVMVSFVVVFRGTFLCPLCFPPFGLYARCFVLPVPFLVCAFCWNRCVG

SEQ ID NO: 281335 - protein, 69 aa, Glycine max
  unsure (1)..(69): unsure at all Xaa locations
  Clone ID: PAT_MRT3847_96067C.1.pep
XXCLXXLAXXXXXXXXXSXSPXSPXRXXXXXFPXXAXCXLXXXVEXSXXXXXXXPGXXSSRVXXTYAXX

SEQ ID NO: 281336 - protein, 125 aa, Glycine max
  Clone ID: PAT_MRT3847_96068C.1.pep
RDLDSRLCFSTWQTGTGTCTSIHLYLEGVELELVMVMAVACVRVKLAYNHTHPQHPRHKQKMLRRRSRERAHTNSDGLTVTVRFAKPEPAAPSMKMTTPAHRQRPYGSPARWWFLSAPRTPAAGP

SEQ ID NO: 281337 - protein, 100 aa, Glycine max
  Clone ID: PAT_MRT3847_96069C.1.pep
NLGLFYSLFGHSLLNFKHVMKLCCWVAITLLLPIQSADNGGCQLYKSALMMNATIIIKNQNHPSRPFYCNLFLPLNTETRTKRSLASTINTTPVPSWREM

SEQ ID NO: 281338 - protein, 107 aa, Glycine max
  unsure (1)..(107): unsure at all Xaa locations
  Clone ID: PAT_MRT3847_9606C.1.pep
XXXSXXNXXYXXILXFXXXXXNXLXXPHXYSXNLLXYXPXXXHXSXXXLFXXXNYFXXXXXSYIXXXXXNNXXXXXXXNXFXLXLXXXKXLXITXXLIXXLXXXXST

SEQ ID NO: 281339 - protein, 83 aa, Glycine max
  Clone ID: PAT_MRT3847_96070C.1.pep
LFFIFEVKKPLKTAKLLALTERLLLGISSGAGAAAALKIAHRPENATMRIIAAFPSFGERTPSSVLYESANRETESMAFTPCI

SEQ ID NO: 281340 - protein, 80 aa, Glycine max
  Clone ID: PAT_MRT3847_96071C.1.pep
SVSNRWIMIMIQRTKASLFIISYVGSKTYDTVLINQTRTYMWKDLKYKEYSSQHMFYSILCCTIMHCSNYYIKQEKDIET

SEQ ID NO: 281341 - protein, 35 aa, Glycine max
  Clone ID: PAT_MRT3847_96072C.1.pep
HIGRMTCSHLSWWRKGGCRLLLEHPPIEYLLLTDT

SEQ ID NO: 281342 - protein, 47 aa, Glycine max
  Clone ID: PAT_MRT3847_96073C.1.pep
NLVSILLRIADSRHAESQVGALKDRNLGTRECDVIGLRNCHLNLTSD

SEQ ID NO: 281343 - protein, 52 aa, Glycine max
  Clone ID: PAT_MRT3847_96074C.1.pep
YFFPGRFKSVCGVRKKGMDLARARVFFMGFVVGGLFAARVSAQTSEFPQAAG

SEQ ID NO: 281344 - protein, 64 aa, Glycine max
  Clone ID: PAT_MRT3847_96075C.1.pep
SRYSARVRLREDDRMGEEKEREGRGIDRVCPYPALLSVVSLIGVAKFPLASLLRLFQKLSLNEF

SEQ ID NO: 281345 - protein, 41 aa, Glycine max
  Clone ID: PAT_MRT3847_96076C.1.pep
KTSPKWHSVENSSFPFHTEVRPPDSSKIRYVMMREVIYARA

SEQ ID NO: 281346 - protein, 80 aa, Glycine max
  Clone ID: PAT_MRT3847_96077C.1.pep
FKGSPIWVKSKAPQKPLEEPTTTKWPKGFFKEGIWPLIFSPPGRCPNGEVWGQGRILKKKLQKTPGGAHQFLSRQVKTQK

SEQ ID NO: 281347 - protein, 91 aa, Glycine max
  unsure (1)..(91): unsure at all Xaa locations
  Clone ID: PAT_MRT3847_96078C.1.pep
LTYRERASYATKSNQHRVVKTPGGELVYQTTKXRGXGPXCPVTGGEVQXVPHLXRAXYNRSRGHXNRGAGNPAYGGGVAGGAGXERIIPAF

SEQ ID NO: 281348 - protein, 51 aa, Glycine max
  Clone ID: PAT_MRT3847_96079C.1.pep
QMIKKKSITHLNSLFYFHFKVFSSFRNSLSYEFYIFKIVLQFSIHVTVFMD

SEQ ID NO: 281349 - protein, 60 aa, Glycine max
  Clone ID: PAT_MRT3847_9607C.1.pep
GSSRIGSSFSPAAPKPGNTRTGYPLLPKEKHKGYQTPCSSLKLSVPSFPSKTLSHNTTQS

SEQ ID NO: 281350 - protein, 47 aa, Glycine max
  Clone ID: PAT_MRT3847_96080C.1.pep
AARRRQKGTAARRRQKGTAARRRQKGTAARRRQKGVLYLFMYLVIFI

SEQ ID NO: 281351 - protein, 125 aa, Glycine max
  unsure (1)..(125): unsure at all Xaa locations
  Clone ID: PAT_MRT3847_96081C.1.pep
ACMDASPSSAATTRDSVYWLPQLDVAQSAHDLXYLLRKGWISCLXFELEHGFVYREHNRSPAYYYGRYWTVWKLSMFGCTDASKVMNELDEAETAYSNGFIRIIGFDNGRQVQCITLIVYKPSGY

SEQ ID NO: 281352 - protein, 36 aa, Glycine max
  Clone ID: PAT_MRT3847_96082C.1.pep
QLLFVSPSKKIVVQDKTFIQPKCASGRYKIIKPVFK

SEQ ID NO: 281353 - protein, 59 aa, Glycine max
  Clone ID: PAT_MRT3847_96083C.1.pep
HDPVSFITLTSLSLVRVFIGTETDSLSVYLEMRLTSTPNDKANNSIDRGRERVREGRRS

SEQ ID NO: 281354 - protein, 43 aa, Glycine max
  Clone ID: PAT_MRT3847_96084C.1.pep
HTWSSMELRLAPYSPTDDPMCSIRSFYCIFCPALGALDCTGLV

SEQ ID NO: 281355 - protein, 93 aa, Glycine max
  Clone ID: PAT_MRT3847_96085C.1.pep
RKQPPPMTVPKETIIKPWQKIFWVLDLSPPLKSPTLLVWEGGSTPPNITKPQTLGKGSPICLKQNWVFFFFISLGKKNIYFSPPFNFAFGYEI

SEQ ID NO: 281356 - protein, 164 aa, Glycine max
  Clone ID: PAT_MRT3847_96086C.1.pep
RFFFPKEIKKKKTQFCLRHRGLTLPRVGGLVMWGGVDATSHPSKVGDIRGRERSKTQKIFWQGLIMVSSGPVMGGGCFGKGIPTSPTKGVLKRSPFKGGKKRVNDMGKGGRKNPFTNGGNSFIPKGSQARERGGHLGVTGGQIQRGFGRHGSPVGGGAQICPRV

SEQ ID NO: 281357 - protein, 52 aa, Glycine max
  Clone ID: PAT_MRT3847_96087C.1.pep
ATARQSLNSYPLNHGVKRHLLNAGICQQYKEDAAAITNAFARYTELYPTLLG

SEQ ID NO: 281358 - protein, 51 aa, Glycine max
  Clone ID: PAT_MRT3847_96088C.1.pep
AASLAHKIKVLSCSEFDPICLERNKFFGCASFVTRKKRIKAFFCLLPLHMR

SEQ ID NO: 281359 - protein, 49 aa, Glycine max
  Clone ID: PAT_MRT3847_96089C.1.pep
PSSLLLSCVGGVVPVSAVASVLILPCGALRSGLCSVLAVRFCVAAGLEP

SEQ ID NO: 281360 - protein, 48 aa, Glycine max
  Clone ID: PAT_MRT3847_9608C.1.pep
SLPILESIQGFSNSKIFKMNVNVNLIPIIFQRLCLVEIQCKFLVRKFV

SEQ ID NO: 281361 - protein, 61 aa, Glycine max
  unsure (1)..(61): unsure at all Xaa locations
  Clone ID: PAT_MRT3847_96090C.1.pep
LGGGRPKILFSGATAMAISLSLISYFLFLDVKWTPRLVVLFVMIYNAAFGFSWGPMPLXVP

SEQ ID NO: 281362 - protein, 43 aa, Glycine max
  Clone ID: PAT_MRT3847_96091C.1.pep
FWFYPTSLHLCNGFPRLHINTIWLNPASRVKCQLAAGFCYSAR

SEQ ID NO: 281363 - protein, 61 aa, Glycine max
  Clone ID: PAT_MRT3847_96092C.1.pep
VYFFFFFFNKYTTTGWTFLLTYNSQAGYIKLKLHKPINIGAIEHHHHHPLILIFTYNIILI

SEQ ID NO: 281364 - protein, 88 aa, Glycine max
  Clone ID: PAT_MRT3847_96093C.1.pep
KTPWGGLIILPLLAGWWLFLLCWLGGFFSFLKGGKGCATIFCWVPPFVAPPVLLFFPAGSLLWVVVGGFFFSAGNYSDHCFPLFLYPL

SEQ ID NO: 281365 - protein, 137 aa, Glycine max
  unsure (1)..(137): unsure at all Xaa locations
  Clone ID: PAT_MRT3847_96094C.1.pep
GWWSKPPDLSFEFRLRAGLGVEGFSGLXPNNGVELWYRVFGFPGGGNMVRDLFPNGVGKRMPVPKVMAIPFLVGAYFAIEMCLGSLVGYGWLKLNTXKAEAMIPATAFGLICGEGPVALPAXFLLLAKLTPPIFMKF

SEQ ID NO: 281366 - protein, 127 aa, Glycine max
  Clone ID: PAT_MRT3847_96095C.1.pep
LKKESGGKPLKEAHDDQTLPLCWRGRRPFRSIYEVRKYFKPIVLSFTSNGRSKAQFEMLPEAYLIVSNMGNVCLGILNGSEVGMGDLNLIGDISMLNKVMVFDNDKQLIGWAPADCDQVPKSRDVSI

SEQ ID NO: 281367 - protein, 74 aa, Glycine max
  Clone ID: PAT_MRT3847_96096C.1.pep
TRYCEPSLDQPVQKWCVFLPFRLGNQDSKYALLWWDRVNSPKSRVRNRRCTIFFSHMVYSKMESVRPPIETFNK

SEQ ID NO: 281368 - protein, 181 aa, Glycine max
  Clone ID: PAT_MRT3847_96097C.1.pep
MDKSSALEYINQMFPNEVSLSGVEPLMQKIQNEIRTVDAGILAAVRQQSNSGTKAKEDLAAATRAVEELMYKIREIKTKAVQSETMVQEICRDIKKLDFAKKHITTTITALHRLTMLVSAVEQLQVMASKRQYREAAAQLEAVNQLCSHFEAYRDIPKIIELRDKFKNIKQILKAHVFSDF

SEQ ID NO: 281369 - protein, 76 aa, Glycine max
  Clone ID: PAT_MRT3847_96098C.1.pep
RVVSSEFGSSERYQIRTSLQLLALQREGSAVSVKKQRSAFPPNFVHSLDSSHMMMTALACNDAGLCFAGLKTTFYQ

SEQ ID NO: 281370 - protein, 55 aa, Glycine max
  Clone ID: PAT_MRT3847_96099C.1.pep
KVPSCFICAQHPRIGVGGPPEFIIFSFQLGKGEIPFGVPKSPRGHSRKKNGNIRE

SEQ ID NO: 281371 - protein, 164 aa, Glycine max
  Clone ID: PAT_MRT3847_9609C.1.pep
QSTLLLTSVFEASVRGKRDAVCRFNSFNFQAIERVLFTRFELRIQYRLSAMAAGLELIPIGTILTVVTNQVLKTAHAASDVLIGKESFKALSTHLFDIEPVLKELQLQELNDSQAARVALESLEADVKKANNLVDKYRNRGRFYLLIKCRSIVEEVEQVTRDIG

SEQ ID NO: 281372 - protein, 181 aa, Glycine max
  Clone ID: PAT_MRT3847_960C.1.pep
VFIIFSDQNNLRRALQCVVSRMQDSELTVRVDSVFALRSFIEACKDLNEIRPILPQLLDEFFKLMNEVENEDLVFTLETIVDKFGEEMAPYALGLCQNLAAAFWRCMNTAEADEEADDPGALAAVGCLRAISTILESVSRLPHLFVQIEPTLLPIMRRMLTTDGQGTSSHFASLSHSPFCL

SEQ ID NO: 281373 - protein, 51 aa, Glycine max
  Clone ID: PAT_MRT3847_96100C.1.pep
IRKKTQYKKTKMICMSLCVCVCQFVLTKILFELFPIIHKNLRCVYLLSQQW

SEQ ID NO: 281374 - protein, 50 aa, Glycine max
  Clone ID: PAT_MRT3847_96101C.1.pep
NCFRRLKVDEVYTGLMIRVVSKVPAEMVSDRGRRRKGKENICEAIAPPSD

SEQ ID NO: 281375 - protein, 42 aa, Glycine max
  Clone ID: PAT_MRT3847_96102C.1.pep
KSTKWIEFLRVFRDLETQETPCPTLTSVLNYCILVLQDYSYS

SEQ ID NO: 281376 - protein, 178 aa, Glycine max
  Clone ID: PAT_MRT3847_96103C.1.pep
DRSAFDATMLSEIDRTMKKHMENMLHVLEGVSARLTQLETRTHHLENSVDDLKVSVGNNHGSTDGKLRQLENILREVQSGVQTIKDKQDIVQAQLQLAKLQVSKTDQQSEMQTSAITNPVQQAASAPVQSQPQLPTPANLPQSIPVVPPPNAPPQPPPQQGLPPPVQLPNQFSQNQIP

SEQ ID NO: 281377 - protein, 61 aa, Glycine max
  unsure (1)..(61): unsure at all Xaa locations
  Clone ID: PAT_MRT3847_96104C.1.pep
YNGTGMATAAFSGDDAPRAVLPIIVAXTPHTGVMVIMAPNHAXCREEAQPKMGILTMTTPN

SEQ ID NO: 281378 - protein, 106 aa, Glycine max
  Clone ID: PAT_MRT3847_96105C.1.pep
ARAGIHETTYNSIMKCDVDIRKDLYGNVVLSGGTTMFPGIADRMQKELTALAPSTMKIKIIAPPERKYSVWIGGSILASLSTFQQMWISKEEYDESGPSIVHRKCF

SEQ ID NO: 281379 - protein, 133 aa, Glycine max
  unsure (1)..(133): unsure at all Xaa locations
  Clone ID: PAT_MRT3847_96106C.1.pep
MGISWSNSNSNSSSRRRRNTYFHPHPPPPYYYHPLPPPPQGYFVASTNPSASTTTGYVGPPPPPTQYYPXWLHCQFRDAKSXXKWXHASPPPYVHHQATKKIRNDVNXHKHTLRLHLDPNNPDHHLMSFYFDA

SEQ ID NO: 281380 - protein, 201 aa, Glycine max
  Clone ID: PAT_MRT3847_96107C.1.pep
DEEQEHLQYTGIWGRIWEVILALRFFVYQYGIVYHLHVARGDKSIGVYGLSWLVVVAVIVILKIVSMGSKTFSADFQLMFRLLKMFLFIGTIVILILMFVLLSFTVGDIFASLLAFMPTGWAFIQIAQACKPLVKGIGMWGSIKALSRGYEYVMGVIIFAPVAIMAWFPFVSEFQTRLLYNQAFSRGLQIQRILAGGKKNK

SEQ ID NO: 281381 - protein, 45 aa, Glycine max
  unsure (1)..(45): unsure at all Xaa locations
  Clone ID: PAT_MRT3847_96108C.1.pep
MAPKKDKAPPRSYKLAKYXGGMQNMKRWSXGKQKGKVNTMVLFDQ

SEQ ID NO: 281382 - protein, 81 aa, Glycine max
  unsure (1)..(81): unsure at all Xaa locations
  Clone ID: PAT_MRT3847_96109C.1.pep
SRADSARGEKTTDGGLDDDAIFRIDTYXLAQIFKEKKNQAGGETAHSQLVLFKLRILSLLEIFLHENPGKPQVLMVYSNLA

SEQ ID NO: 281383 - protein, 75 aa, Glycine max
  unsure (1)..(75): unsure at all Xaa locations
  Clone ID: PAT_MRT3847_9610C.1.pep
FKGDQLAFYLNSFNLYEEASQGRKDNGNRAQTSSFNELEAATGSFRMDRYLVEXGSGKDYKGYFXSINLGVAINQ

SEQ ID NO: 281384 - protein, 172 aa, Glycine max
  unsure (1)..(172): unsure at all Xaa locations
  Clone ID: PAT_MRT3847_96110C.1.pep
GFQKGIKKTTNGINTLVGRGVEEPQRKRTSNTNGKEKPEXWVVLLMVWQNLKVLGFISXTILQGSWPNLNLARRNHLLGGLTWALFPVPNHGIELXKAPEELDTPIGKDREGEKSDLKKLTDLPTLRKETMGPYSPKPGITPPASLEKWTFSXGGYHIPSRTQFNRDTWEKP

SEQ ID NO: 281385 - protein, 59 aa, Glycine max
  Clone ID: PAT_MRT3847_96111C.1.pep
FSLVIILHTLTSVSFMFYPTTVSRNVCLECFDLSSSPWLNPLELKLPHFFLSLYMSFVN

SEQ ID NO: 281386 - protein, 182 aa, Glycine max
  Clone ID: PAT_MRT3847_96112C.1.pep
MGWVWKDDNSDDVRRDNSSERCATTKVVKSQCRTEEVETGKFVRKCEKTEEILRNCIGKPAEVLQSNKEYTEEDITDEVLKGRSVPFSSSDGASGVVDFPGLQNDIEVMERNLLSGLSHFFDAANGFFDVFSKSPSIFDAESSSPSVRRGIPIEEYRRPEAYPKSKEKESGDTDFVAMAKDV

SEQ ID NO: 281387 - protein, 265 aa, Glycine max
  unsure (1)..(265): unsure at all Xaa locations
  Clone ID: PAT_MRT3847_96113C.1.pep
MSSCCLEKENHVVETATPQREDTDIILDAMVLGSNVVFPAALNAAIELKVFEIIGKESSEESGGFMSPHEIASKLLLPTQQHHSDLPNRLERLLLLLASYSLLTVSTRTDENGSAVRVYAVSPSGKYFVYDKNGGGYLASFTSFLCHPAMLGVWLNFKEAIIDPEIDLFKKVHGISKFEYFGKEPELNHVFNKAMNDVCTTHMKKILEVYTGYEGISTLVNVAGGTGQCLKLIISKYPSIXGINFDLPKGIETEPPIPGGEHIGG

SEQ ID NO: 281388 - protein, 67 aa, Glycine max
  Clone ID: PAT_MRT3847_96114C.1.pep
APTQTTLLDRQGSDHSRLMWNGSYRPISQYINEDNVRLTAALRIEQHLSRADHPTGQRSSMRSVKPP

SEQ ID NO: 281389 - protein, 49 aa, Glycine max
  unsure (1)..(49): unsure at all Xaa locations
  Clone ID: PAT_MRT3847_96115C.1.pep
SLELDPSIYILILLIFLYFFFRIKLXLGAFFFHTGPTTIHXHTTTDKLE

SEQ ID NO: 281390 - protein, 42 aa, Glycine max
  unsure (1)..(42): unsure at all Xaa locations
  Clone ID: PAT_MRT3847_96116C.1.pep
VVWKGRLIWSSSSCWIQDSCXDFDVLXWGYEIQSFNLLVXXX

SEQ ID NO: 281391 - protein, 150 aa, Glycine max
  unsure (1)..(150): unsure at all Xaa locations
  Clone ID: PAT_MRT3847_96117C.1.pep
SSFPSFIQNAAFAVVSFLMIPATAKEDMIFECDMALEELPNSAMYNNELNTMDVEPIRSDAAYDRTLCSDGVPSSEVSYMITASCNPFNKDKFDANAALDCDLDPCSSTKFMVVACXHSWECLSDVLHCQPIHAYVVRNVANLVPPFDAP

SEQ ID NO: 281392 - protein, 244 aa, Glycine max
  Clone ID: PAT_MRT3847_96118C.1.pep
MAHWGHYDLNCDLKNGVNMCCDEESFVKEINTTSIEYAVKVLLMDLGEDINREGIIKTPHRVAKALFEGTRGYKQSAKEIVEGALFPEAGVDSTKVGHAGELVIVRDLEFYSYCESCMLPFYFKCHVGYVPSGQRVLGLSKLSRVTNVFAKRFQEPQRLANEVCSALHQGIEPAGVAVVLQCTHINIPDTESNFFDSNHKGLVETLVSSGSGVFENNDADTWGDVFGLLKVRGIDKDKVHVKRS

SEQ ID NO: 281393 - protein, 55 aa, Glycine max
  unsure (1)..(55): unsure at all Xaa locations
  Clone ID: PAT_MRT3847_96119C.1.pep
MTFKRRIGGRNKHGRGHVKFIRCSNCGKCXTKDKAIKRSQVRNIVEQAAVIDGYE

SEQ ID NO: 281394 - protein, 106 aa, Glycine max
  Clone ID: PAT_MRT3847_9611C.1.pep
KGKQTRRQEPDRKTRNDPRELPRGRPRADGKEEKKRTAPNNKRTDTTTRAQGKTDEDTKKQRQTPTSRSRQERPRKKQKRKTHKRKTKQQGQHRSEQQQQRRQKGD

SEQ ID NO: 281395 - protein, 220 aa, Glycine max
  Clone ID: PAT_MRT3847_96120C.1.pep
MAKSSKDPTTSYPAIKSEQYLHSPVHYAVAIRDHTKLSRIISSLPRVPDPARVITESDSLTQERVAEKISAVLDRRDVPFRETPLHLAVRLNDVSAARAIASAGADISLHNAAGWNPLQEALCRRASEIAQVLVRLHHRAAWAKWRRRLPRLVAALRRMRDFYMEISFHFESSVIPFVGKIAPSDTYKIWKSDGNLRADTTLAGFDGLKIHRADQSFLFL

SEQ ID NO: 281396 - protein, 38 aa, Glycine max
  Clone ID: PAT_MRT3847_96121C.1.pep
IGKDQLARRHLFTRAYITLPIISDSMLTFPYALCNIIS

SEQ ID NO: 281397 - protein, 95 aa, Glycine max
  Clone ID: PAT_MRT3847_96122C.1.pep
RSAFLEEFGRKENYLAKRPLLIRLLPGTRISGLRLEGKENCGNHGILATEGGANLRTLPQKEGRWFIFLKNGLRGSGRSNWQGNKFPNNQKGFWG

SEQ ID NO: 281398 - protein, 120 aa, Glycine max
  Clone ID: PAT_MRT3847_96123C.1.pep
RHILKAEPHNLVSEGRPRMTGIMIRWKRHKCKVLRYYRSVSHMAALLQVGLYRNHPHPEAKIMSLKTTGRCTNTQDHSSWIAPIHVDTIIHCENLDEVFIEGTNTNHLPTHEINYMLQAD

SEQ ID NO: 281399 - protein, 38 aa, Glycine max
  Clone ID: PAT_MRT3847_96124C.1.pep
PGPWKVLRRVGNRKYVGLHQQNSMPSLKEVALEILPSA

SEQ ID NO: 281400 - protein, 59 aa, Glycine max
  Clone ID: PAT_MRT3847_96125C.1.pep
MKKFLEKIIHVRMNMLKNGLNVRLFLMFVLHLREQENKDPEDRGYATLVLNDPVLKCLY

SEQ ID NO: 281401 - protein, 106 aa, Glycine max
  unsure (1)..(106): unsure at all Xaa locations
  Clone ID: PAT_MRT3847_96126C.1.pep
RPFIPRPEPPTLFPFPGPISYFPSRGGVSSNPTLYIXYFXNYPHPRXPPALPXXFFSPPPPTNXLQXXPLALXXPPPPTPXPPPPNPPPLSTPAPPPPPALRQRPP

SEQ ID NO: 281402 - protein, 79 aa, Glycine max
  Clone ID: PAT_MRT3847_96127C.1.pep
SVANCATRGRLWGATSCAFHTAAPGKCLTGNCSGVLQCVFSGAPSNALPDFALNLSHYLDFYDFSLVNCFSVPLPLTPT

SEQ ID NO: 281403 - protein, 87 aa, Glycine max
  Clone ID: PAT_MRT3847_96128C.1.pep
SLQVFFLPPHDSGPAELASAAPFYVVPMFGVSVFISFWWSETLLSSGSLLRFLFFGGKFVSLRSPPPLWGATWTSGFCFLGVEKGPK

SEQ ID NO: 281404 - protein, 108 aa, Glycine max
  Clone ID: PAT_MRT3847_96129C.1.pep
KKKKEAQFAPPPPGGTIKKRTGGDFFPPKQTKKKLKPPLDFFKKKKILKQLSPGDHLFWDPYKNQPPPERGKKRGGLKSRTPLELNQDPTHPFVKNTFWGSPFLASKG

SEQ ID NO: 281405 - protein, 364 aa, Glycine max
  Clone ID: PAT_MRT3847_9612C.1.pep
MSATKLSSSISPASSISDWSSSESSSTTSMAKRVCNSSRPSIDCGSSRKVLLNTDADQGTHPQTPLSDSSLERQEARQSGIISQKERTVPGATVLPPVSKKPSGLRLPSPKIGYFDGVKPLVRTPRGSVVPGGLPKHGAESPREGQNKAELGKLQPSRSFVSIDNTKPNNQQPPHPNPFHESLDVAIKTSNSVQNGKSSSDISIGAVENTSHFHVVEKAHHDLPPLKGVNNQENAHHDDQIDCLSKQVGHMDINFEIGEKFNSDSLYLLQNDISFQDKSNGLDLSSHKELIDCPKKDELFNGLSTTYLYVSPTSFDVVASTRRPFAVKDSFCNMDGVVFTDSTVSEAKSTNLPVPESIIMKENE

SEQ ID NO: 281406 - protein, 85 aa, Glycine max
  Clone ID: PAT_MRT3847_96130C.1.pep
NSHQLRRRLNPIVWIKFINLSFKNFNKCSYWIFHIKSNILLSLSQKKYIYYTHKKVWASFISLELESLYTWKFEPQRLLSSKRRI

SEQ ID NO: 281407 - protein, 43 aa, Glycine max
  Clone ID: PAT_MRT3847_96131C.1.pep
VNLYYGKIESKEGTVFRSPIYEIDSGSRPSFKTEGKSGKLGSA

SEQ ID NO: 281408 - protein, 72 aa, Glycine max
  unsure (1)..(72): unsure at all Xaa locations
  Clone ID: PAT_MRT3847_96132C.1.pep
TNRKRERKNKQIIEFPLLIYHYYFIHLSCRNFPKEEEVPELLWFCFVWVPFSFFXPILEIPEPASDPDSKCT

SEQ ID NO: 281409 - protein, 48 aa, Glycine max
  Clone ID: PAT_MRT3847_96133C.1.pep
KSIVQSRCICYIIVLISHIVGMLSIIIFICEQACHQGILTKFDIEDYV

SEQ ID NO: 281410 - protein, 47 aa, Glycine max
  Clone ID: PAT_MRT3847_96134C.1.pep
TRQGSNSNPNSHGYLRTKIRRRLKACHTMSNHPIQLDFQQGLDVQRT

SEQ ID NO: 281411 - protein, 42 aa, Glycine max
  Clone ID: PAT_MRT3847_96135C.1.pep
QIRFTKLRDISFFRQKHCDVDYQHFSVCFSSQKRTLFHINGY

SEQ ID NO: 281412 - protein, 91 aa, Glycine max
  Clone ID: PAT_MRT3847_96136C.1.pep
GGVFFFGIFFFFTRATKFFWENHFTSSIQRNRAPGKFPQTTWGDRKSTPKNVGGNRATIFIPYIYPKTDKLLGILANILRKKQGGKNHPLF

SEQ ID NO: 281413 - protein, 59 aa, Glycine max
  Clone ID: PAT_MRT3847_96137C.1.pep
EPCAVPQVVGPADPSASPTRRTPGIREGRLRITRSYRWPLPPSKGLDIEGQGSTVLSAR

SEQ ID NO: 281414 - protein, 398 aa, Glycine max
  Clone ID: PAT_MRT3847_96138C.1.pep
TLEPDIVVYHAVLNACVRRKQWEGAFWVLQQLKKQGQPPSATTYGLVMEVMLSCGKYNLVHEFFRKLQKSFSPNSLTYRVLVNTLWQEGKPDEAILAVQEMERRGIVGSASLYYDLARCLSAAGRSHEALKQIDKICKVANKPLVVTYTGLMQASLDAGNIQDGAYIFEKMKEICAPNLVTCNIILKAYLEHGMFQEAKVLFEQMSENANRLRGNTDYKMLVVPDTYSFNTMLDACVAEKRWDYFDHVYQRMLYHGYHFNPKRHLRMILEASKAGKERPLEITWKHLTDTDRIPPAPLIKERFCAKLEKDDYVAALTCIINNPPKDLQPFSKSSWLKLFKENSQRFQKDTIVGLMNEASNIVSNNSFPNPTLEYLIQSCKEFLFATVLSTADMDSVKM

SEQ ID NO: 281415 - protein, 62 aa, Glycine max
  Clone ID: PAT_MRT3847_96139C.1.pep
KKPATLKHIKDPLMAQEEMTPGAGTHSRAAMVSKNSKPNPTQIDARSRQIINASFASADCNN

SEQ ID NO: 281416 - protein, 122 aa, Glycine max
  unsure (1)..(122): unsure at all Xaa locations
  Clone ID: PAT_MRT3847_9613C.1.pep
MSEHSTSVPLRKHNQKLLTKSQIFLGAPAKAEKKPAEKKPAEEKAPAENKPNADTKISNERGSDKNKNRTMKSVETXMIYIFKVLKHVHPDIGISSRAMGIMNSFINDIFEKLAQDASRWAR

SEQ ID NO: 281417 - protein, 98 aa, Glycine max
  Clone ID: PAT_MRT3847_96140C.1.pep
KLQGLIPTHKGDLLQIYKHPTDEQWRSSCAIHIQAMLHTAWIQIILPTTGVCSTSNPSVQKQRHLWAHEFIKMQSYAHTAHKYLKLNHYIAYDQEHTA

SEQ ID NO: 281418 - protein, 82 aa, Glycine max
  unsure (1)..(82): unsure at all Xaa locations
  Clone ID: PAT_MRT3847_96141C.1.pep
KQQSTLSSLILLSSLXPLILSKPTKKKMVAENYPXPXYFILLFITITRLIXTVGKTSPMDEGLSLTRELXXSPSTTXFFEAP

SEQ ID NO: 281419 - protein, 63 aa, Glycine max
  Clone ID: PAT_MRT3847_96142C.1.pep
WIAITTFYFHTVHNFTEKEKYLAYFEKLMESIMMISLYIEYRNFRTEVLNRCSFGEDPCLYTR

SEQ ID NO: 281420 - protein, 50 aa, Glycine max
  unsure (1)..(50): unsure at all Xaa locations
  Clone ID: PAT_MRT3847_96143C.1.pep
PPLVFYGFSPTYLFIVLINKEVGGFAPRRXXRSRSTHASAQESDLRVPEQ

SEQ ID NO: 281421 - protein, 235 aa, Glycine max
  Clone ID: PAT_MRT3847_96144C.1.pep
MAGAIHATKHQKLPLAQHQEDQNKFYYHFLYKATLVLIFFVILPLLPSQAPEFINQSLLTRNWELLHLLLVGVAISYGLFSRRNDETDKEHNNSKFDTAQTLVSRFLQVSSFFEDEGESPVESDETKVQTWSSQHYRNEPVVVVAAPQLQKYSSFDDQSGEKPLLLPIRSLKSRLSEEDIDVQSLNMSMSSKRFSSYSNRKAEVEAVDVDVQYLNSSTTFKRFSSNSRNAEVKMC

SEQ ID NO: 281422 - protein, 61 aa, Glycine max
  Clone ID: PAT_MRT3847_96145C.1.pep
GSSGTLRFFTPIPIFPPPFSHIFRQSDTSLSVVAATYPLFSPYHLQLLNSIWITLLKFFPN

SEQ ID NO: 281423 - protein, 54 aa, Glycine max
  Clone ID: PAT_MRT3847_96146C.1.pep
YNIFYFFHSKYAFWGGGNYIKHFYPNKTRWYLVHICSLKTIMNRPQDQESKINC

SEQ ID NO: 281424 - protein, 105 aa, Glycine max
  Clone ID: PAT_MRT3847_96147C.1.pep
MLRDESVGSRSARHSATATATVSNKVLVAVKAEKVISNTALAWALTHVAHSTDSITLLAVYSSHKTGRRFWNFSRLAGDCTNGPAGKLPEQIPDIFESCAQMVLQ

SEQ ID NO: 281425 - protein, 748 aa, Glycine max
  unsure (1)..(748): unsure at all Xaa locations
  Clone ID: PAT_MRT3847_96148C.1.pep
MAEFLDLESQDGVRMPWNVIPGTKQDAQNAVVPISAVYTPIKHFPSMPVLNYSPLRCRTCRSVLNPFWIVDFAAKIWICPFCFQRNHFPPNYSSISDDTPPAELFPQYTTVEYNSDAAVGPTYNNPSVPPVFLFVVNTCVIEEEIGFLRSALAQAVELLPENSLVGLITFGTFVHVHELGFGAVPKTYVFKGSKDLTKDQLLEQMSFFAKKPRPAVGVVAGARDGLSPESISRFLVPASECEFTINSVLEELQKDPWAVPADQRAARCTSTALSIAAGLLGACVPGSAARIMAFIGGPATEGPAPIVSKQLSEPIRSHKDLDKDSVPHYHKWILLLDSLFTVVIFHGSTIAQWRKAGYHNEPEHQAFAQLLLAPHDDSDLIIKERFPVPRLVVCDQHGSQARFLLAKLNPSATYNTESYNPGGDIIFTDDVSFEVFLDHLQRLVVQXKITVLPWTFYVKFSFDCCLYITFILVCCYNFQFCAKFLCLSGXWVAGPESIQDLIAGFDQEAAAIVMARQVSFKMETEAEFDPIRWLDKALINLCSRFGEFQKDTPSSFSLSPRLSIFPQFMFHLRRSQFVQVFNNSPDETAYFRMILNRENVANSVVMVQPSLISYSFHAGPEPALLDVAAIAADKILLLDSFFTVVIFHGSTIAQWRKAGYHNEPEHQAFAQLLRAPHDDADLIIKERFPVPRLVVCDQHGSQARFLLAKLNPSATYNTESYNPGGDIIFTDDVSFDVFLDHLQRLVVQ

SEQ ID NO: 281426 - protein, 269 aa, Glycine max
  unsure (1)..(269): unsure at all Xaa locations
  Clone ID: PAT_MRT3847_96149C.1.pep
GRVGGRVGKDSVPHYHNCVKFYDGLSKQLVHQGHVLDLFACALDQVGIAELKTAVERTGGLVVLAESFGHSVFKDSLKRVFQSGDYDLGLSSNGIFEINCSKDLKVQGIIGPCASLEKKGPLCSDVVIGQGGTSAWKMCGLDKSTSLCLFFDVVRKETPDATMQSTSNQFYFQFLTXMFCFSYQNNSGQMRLPRVRTTLSRRWVAGPESIQDLIAGFDQEAAAIVMARQVSFKMETEVSAGCFLHFSYIWINVSTFCACVCVWKGSTYC

SEQ ID NO: 281427 - protein, 71 aa, Glycine max
  Clone ID: PAT_MRT3847_9614C.1.pep
DSSESDYTLFLVSGYGIIQHAFFRSLVFLPVSLDLHLLLLQLSLHVLLLSQIKPFHNNNSIQYYYYYTLQH

SEQ ID NO: 281428 - protein, 135 aa, Glycine max
  Clone ID: PAT_MRT3847_96150C.1.pep
MPELLFKTITQQSFTIEVEETATIGEVKRKIQQVKGAEYPAENQKLIFNGRMLEDAMLVSELNFAAPKFIVIMVMRKPAQASSTVRSATSSTSPQKKTSTADGQAPKVAEDKATGATSNTSVAQSGAANGVPAEH

SEQ ID NO: 281429 - protein, 78 aa, Glycine max
  Clone ID: PAT_MRT3847_96151C.1.pep
LFMLFDPCNITRKHEGIKVHDLSFSSISRHKISTGRPTPSLSCWHNFLWEISLKTQIIKSIIDSHAFVTINFGDYEAT

SEQ ID NO: 281430 - protein, 50 aa, Glycine max
  Clone ID: PAT_MRT3847_96152C.1.pep
LICCSLVLKNGFEDSNSTYPRPVGHARFDLLGGLMPLVGGSGYTLVSGNP

SEQ ID NO: 281431 - protein, 62 aa, Glycine max
  unsure (1)..(62): unsure at all Xaa locations
  Clone ID: PAT_MRT3847_96153C.1.pep
XLSQGQESHQHSKAKFYFYLNTLRWASKMAIIRIQKWIPNNTQLLPLSPSLFRNCFYIYILL

SEQ ID NO: 281432 - protein, 37 aa, Glycine max
  Clone ID: PAT_MRT3847_96154C.1.pep
DELLAETSGVTTESVTSLATMCTLSHKIQMIMLLLEP

SEQ ID NO: 281433 - protein, 77 aa, Glycine max
  unsure (1)..(77): unsure at all Xaa locations
  Clone ID: PAT_MRT3847_96155C.1.pep
PRVRYQARREDTLLKLAHFRRHKRKTLKKTPGKATELPFYKPEEXTPPGKDSTKKISNIIGKAANYAGSAKSKKVKC

SEQ ID NO: 281434 - protein, 176 aa, Glycine max
  Clone ID: PAT_MRT3847_96156C.1.pep
HASGQQLVRSEIMETYGNMLPHSFRDMDRLRNLKALTMVIQESLRLYGPAVTTARGVLAEMKLGEHVPPKGIDMWLYLPAWLRGPDDWGPLPRGPQPEWWPGGGSAACMCPLAATPCGRARRRCSGPLFARLQILGAPCLLRSLVAFPVPPSSLQRPHHWVSGAPFAGARPLPCYK

SEQ ID NO: 281435 - protein, 48 aa, Glycine max
  unsure (1)..(48): unsure at all Xaa locations
  Clone ID: PAT_MRT3847_96157C.1.pep
SGFYTRKASNLKKIAXYFCFLKYDGDIPSSIEGLLLLPGIGPKIAHLV

SEQ ID NO: 281436 - protein, 23 aa, Glycine max
  Clone ID: PAT_MRT3847_96158C.1.pep
VNTMLKIITFYDYTLSFLDPATF

SEQ ID NO: 281437 - protein, 78 aa, Glycine max
  Clone ID: PAT_MRT3847_96159C.1.pep
IVVARQRSYPLPETKPNSIVTAPDMAVLFVADNSAAKTLFGNYARLLPVNRGGITWHQLEHEVNSSKEESLSVTPKMS

SEQ ID NO: 281438 - protein, 51 aa, Glycine max
  Clone ID: PAT_MRT3847_9615C.1.pep
EAKAALLGRIQRLTKLILVSTTASSSTRFPNRPGPRRRHSFGEEELAYLPY

SEQ ID NO: 281439 - protein, 177 aa, Glycine max
  unsure (1)..(177): unsure at all Xaa locations
  Clone ID: PAT_MRT3847_96160C.1.pep
ALSMISSSAVTTVYRACAGMVAPFTVLKSMAGFPTRKTNNDITSIANNGGRVHCMHVWPPSVKKKFDTLFFLPHLADAQLANGSEYLPMMGWISCLQFKLEHGSVYREHNRSPGYYYGLYCTMSKLPIFACTDASHASKDLLEAXTVFPDGFLRIIRFHNVRQEHCIIFISYNRSCF

SEQ ID NO: 281440 - protein, 62 aa, Glycine max
  unsure (1)..(62): unsure at all Xaa locations
  Clone ID: PAT_MRT3847_96161C.1.pep
XFWXFNFXDWLMXXINLXIWIXMXCQMXXVXXLXNINGAVDFGXPWVWFDLXGWITGXPEEP

SEQ ID NO: 281441 - protein, 69 aa, Glycine max
  Clone ID: PAT_MRT3847_96162C.1.pep
NPIRICHVTFSSLSPSLLFPHHCPKSPTVTKEIFWKFKEKVFAIPVLPKWHCNVSLMPRPVCYVTSQSQ

SEQ ID NO: 281442 - protein, 118 aa, Glycine max
  Clone ID: PAT_MRT3847_96163C.1.pep
EEQEEAAVSGIRKELMRNIPYLVIIDDLESEKDWWDHKLVMDLLPRFGGETHVIISTRLPRVMNLEPQKLSYLSGVEAMSLMLGSGKDYPVAEVDALRTIEEKLGRLTLGLAIVSGIL

SEQ ID NO: 281443 - protein, 35 aa, Glycine max
  Clone ID: PAT_MRT3847_96164C.1.pep
SMVGHIVQYFLTRVKIKKTQLSYKAIRQHSKKCDR

SEQ ID NO: 281444 - protein, 61 aa, Glycine max
  Clone ID: PAT_MRT3847_96165C.1.pep
GNFVDLINFPSRFAPKHGTMPRQMVQHILDFMMSKLIITIQRINGSSSGSHPPTPHPQPDE

SEQ ID NO: 281445 - protein, 44 aa, Glycine max
  Clone ID: PAT_MRT3847_96166C.1.pep
HFMHRPHCVLVQNRNLSCTVNNNALWSIVNTILTIFVLRNKIFD

SEQ ID NO: 281446 - protein, 110 aa, Glycine max
  Clone ID: PAT_MRT3847_96167C.1.pep
NSLLQPASLHQLQLQQNIIIPIYLRYTFLLSLLLVLHHMFITITFNINSKQQITITNFSHLSLFFNDISSFTIFLLCLTITRLLSSTTSFGSHRKLLHPLSTPRCFQSPT

SEQ ID NO: 281447 - protein, 515 aa, Glycine max
  Clone ID: PAT_MRT3847_96168C.1.pep
MAKPRRSKMMSLKLPFLLTLFLALSQAQPHSDDPPPPPSSNVCVIGAGIGGSSVAHFLRKYSPSSTPSTKIRVFERNGRVGGRIATVTVAGETFEAGASILHPKNLHTVDYVKILKLKVKEPTASEDSLSLGIWDGNKFVFKTVSPLSSTVPLIDKLLKLPFVNTLVSFVNSALMFVRYGFSLFKMQNFVEIAVDKFVKYYEDPGSRPIFETVDEMLQWAGLYNLTTRTLRDELVDAGLSTSLINELVTVITRINYGQSVSMSGLGGVVSLAGSGGGLWSIEGGNWQMAAGLINQSDVALHLHEEIKSVADLGDYYELNSTKGNSYRCEVAVVATPLDELDIQFIPPISIPERKLQHTFTTFVRGLLNPAYFGLKAVTKIPDLVGTIEDPELPFSCIAVLKKHNEKESTYKLFSRQPMADTLLDSIFSVRKETIRINWAAYPHYHAPEVFAPFILDGRHLYYVNAFENAASTMETSAVAAENIARLILSRYFGQVIVHSSNLSASSQGEGTHLDL

SEQ ID NO: 281448 - protein, 42 aa, Glycine max
  Clone ID: PAT_MRT3847_96169C.1.pep
NSCHSACKSCICALSYPAQCFCVDITDFCYEPCKPSEDDKEN

SEQ ID NO: 281449 - protein, 189 aa, Glycine max
  unsure (1)..(189): unsure at all Xaa locations
  Clone ID: PAT_MRT3847_9616C.1.pep
CGGAGPKISWTQXETGSAITWKYPSVVLEGDGSXGEFYSVALTNNYQQADTGTKMIHKGKNTRSRIISKGISVGHSRNCYRGLVQVLSKADNARNSSQCDSMLIGDNAAANTYPYIQVKNPTARIEHEASTSKIGEDQLFYFQQRGIDYEKAMAAMISGFCRDVFNELPDEFGSEVNQLMSLKLEGSVG

SEQ ID NO: 281450 - protein, 129 aa, Glycine max
  Clone ID: PAT_MRT3847_96170C.1.pep
GGKANGPLNPRGIRRLTPFPETPPPEWDPKKSRLKNLLVLSNPAPIFKGNPLTLKSFRQPKSQDIHFQKTLTQPLPKYVKPKNPPFPSKLSLWPPKDFPGNMAINALSPSILSFAQKKLGTKNTPQFPP

SEQ ID NO: 281451 - protein, 224 aa, Glycine max
  Clone ID: PAT_MRT3847_96171C.1.pep
MSFESGMVMEEHDSEKVEIVLKTIGPARPSRLLVSSSIKVRDLRRLIAGNDNLQIDNLSLILRGSALYDMKNGDDVYIQLNDGDCLIVAVKPKPPVKDGYDNDDEDEDLKFRLPQSSSWWKKRLYTFLHDNLKLPDILLMVIFTLSLKAWLLIILWFILAPVAHRWDLGPLYILATGFCLILFNLGKRQAGDISAYSIFNEDFRELPGTLNADRLDRDIRAGQF

SEQ ID NO: 281452 - protein, 48 aa, Glycine max
  unsure (1)..(48): unsure at all Xaa locations
  Clone ID: PAT_MRT3847_96172C.1.pep
ISVVLESSLLGPQSLITYLLALALIRFATCCLSPLQAGPGRTXWRLCF

SEQ ID NO: 281453 - protein, 46 aa, Glycine max
  Clone ID: PAT_MRT3847_96173C.1.pep
GRPSDDGGEAAGVDAVCEFFNGTLPGVAGGASEAESQEVIIIPLIL

SEQ ID NO: 281454 - protein, 46 aa, Glycine max
  Clone ID: PAT_MRT3847_96174C.1.pep
KVKAEFPPMEEKPKGKTGEDVKENGFHLGEMEMFLGKKQFVIEPPS

SEQ ID NO: 281455 - protein, 57 aa, Glycine max
  Clone ID: PAT_MRT3847_96175C.1.pep
GQHHSFFCCCCGLRFLGHETQRGSGWLPLVNQIHFLPGYADSLVLSCRTKRIEFVGF

SEQ ID NO: 281456 - protein, 122 aa, Glycine max
  Clone ID: PAT_MRT3847_96176C.1.pep
IGNIKKKKKKKKKKKGKKKGAKRKKRENTTKKKKHKEKKKKRKGRKPTKKKEKNLKKKTKNQKVKPKNRGGKKRGPGEETGEKKTGNEKNSRREGWSPMEGKKGRRARNTDPKHWAQGQNAI

SEQ ID NO: 281457 - protein, 51 aa, Glycine max
  Clone ID: PAT_MRT3847_96177C.1.pep
MLVYCWEELGWTIDGLLIMGAGPIGLDTMLPYHAEGAPLSVLVDGDDQRDS

SEQ ID NO: 281458 - protein, 317 aa, Glycine max
  unsure (1)..(317): unsure at all Xaa locations
  Clone ID: PAT_MRT3847_96178C.1.pep
MAACIFTVAQDGTADFQTVQEAIDAVPLGNIRRTVIRVSPGTYRQPVYVPKTKNFITLAALSPEDTVLTWNNTATGIDHHQPARVIGTGTFGCGTTIVEGEDFIAENITFENSAPEGSGQAVAIRVTADRCAFYNCRFLGWQDTLYLHYGKQYLKDCYIEXEVGDFIFGNSTALLEHCHIHCKSAGFITAQSRKSSQETTGYVFLRCVITGNGGNSYAYLGRPWGPFGRVVFAYTYMDQCIRHVGWDNWGKMENERSVCFYEYRCFGPGCCPSKRVTWCRELLDEEAEQFLTHPFIDPEPEKPWLAQRMALRIPYSA

SEQ ID NO: 281459 - protein, 96 aa, Glycine max
  unsure (1)..(96): unsure at all Xaa locations
  Clone ID: PAT_MRT3847_96179C.1.pep
DLLDPKLRGRTDSSVHEMLQTLAVSFLCVSNRAEDRPSMKDTVAMLKEIRPVEASTTGPDVLKGVLSVHTSTSTSYEXVSHGTSNCSFHFSEDSIC

SEQ ID NO: 281460 - protein, 544 aa, Glycine max
  Clone ID: PAT_MRT3847_9617C.1.pep
MASLLRCNGVFLSPLPPQPRRDPILPKFFLPQSPNPKPSRLLTVRAEVKETSSAAATTTTTTSSDDKIREILRNRDYDKKFGFSVDIESLTIPKGLSKETIRLISSLKEEPQWMLEFRLKAFEKFLSMKEPTWSDNTYPPIDFQNICYYSAPKNKPSLQSLDDADPELLRYFDKLGVPLNEQKRLANVAVDAVLDSVSIATTHRKTLEKAGVIFCSISEAIKEYPDLVRKHLGRVVPSDDNYYAALNAAVFSDGSFCYIPKDTKCPMQISTYFRINALETGQFERTLIVADDRSSVEYLEGCTAPSYDRNQLHAAVVELYCGEGAEIKYSTVQNWYAGDEEGKGGVYNFVTKRGLCAGAGSKISWTQVETGSAITWKYPSVVLEGDGSVGEFYSVALTNNYQQADTGTKMIHKGKNTRSRIISKGISVGHSRNCYRGLVQVLSKAENARNSSQCDSMLIGDNAAANTYPYIQVKNPTARIEHEASTSKIGEDQLFYFQQRGIDYEKAMAAMISGFCRDVFNELPDEFGSEVNQLMSLKLEGSVG

SEQ ID NO: 281461 - protein, 92 aa, Glycine max
  Clone ID: PAT_MRT3847_96180C.1.pep
FWVRSIWWFWKFWVRSIWCIWGRKSNQSSTFVIHMVVVSVLLGMTQIMTVTIDESRFNFNLALCDGKGYGIRIIHSILWGIIFYWDKSLAQT

SEQ ID NO: 281462 - protein, 80 aa, Glycine max
  Clone ID: PAT_MRT3847_96181C.1.pep
HDQMRMIDNINALISELSLEKEELIKALTSVLSECYRMKDINKELSTKLEVQTQRLELTTAQSMDYENVYAEQLDCKCYV

SEQ ID NO: 281463 - protein, 78 aa, Glycine max
  Clone ID: PAT_MRT3847_96182C.1.pep
SSKALLMLPFFLLLQAEPWFCTGRGKNFGLRMVPQISQIAPYPFLSPPGISSSCFFFCCNSGSLRGACLSKRQAFFKC

SEQ ID NO: 281464 - protein, 109 aa, Glycine max
  Clone ID: PAT_MRT3847_96183C.1.pep
KENGVTPHYRKEESKPYLPGDETYTDSGERCEPSLANDYKNCLHSKLLAEHNTTASKASEVLYGCVSNKCMNSYVFPLSGKHCLRKFWISLRLTIPRFFNKSIVITSGF

SEQ ID NO: 281465 - protein, 47 aa, Glycine max
  Clone ID: PAT_MRT3847_96184C.1.pep
GHVCGGSGLSVLYSQINRKSFCHSHLSRNRSPKFLAFKVKGLFYLAQ

SEQ ID NO: 281466 - protein, 71 aa, Glycine max
  Clone ID: PAT_MRT3847_96185C.1.pep
TFPSSLRFNLWLTKVVKHVQHLLQVLTLSSFDALWINHLLHWKKILPSLVFPTNFVILVTKSLNSYALPVE

SEQ ID NO: 281467 - protein, 68 aa, Glycine max
  Clone ID: PAT_MRT3847_96186C.1.pep
LFQFIKIKLLNIFLYVGEPVKSNLARAVLAPWLFAILIVTSSFTASLSSMMTVSHLEPSVPDIQTLLG

SEQ ID NO: 281468 - protein, 41 aa, Glycine max
  Clone ID: PAT_MRT3847_96187C.1.pep
AWHGMMESVISWQSCNFLGLFLSLFGCSCVSGLLSLERNIN

SEQ ID NO: 281469 - protein, 303 aa, Glycine max
  unsure (1)..(303): unsure at all Xaa locations
  Clone ID: PAT_MRT3847_96188C.1.pep
EAVRAGFATDGFVLNARVERSLIRCLIETPPHRDPVPWNSMLTAYVHHGLEVEAMKIFRQMILXGCEADSVSISTILTGGSSLGLGVQIHRWVIRRGHERNLSIGNSLIMMYSNNGRLEKARXIFNLMPERXDVVSWNSIISAHCKRREALSFFKQMEESGVDPDKITFVAIXISXAYLGLVKDGERLFSXMCGKYKXXPIMEHYGCMVNLYGRAGLIKKAYSIIVDGMGSEAAGPTLWGALLYACFMHGDATIGEIAANRLFDLEPDNEHNFVLLMRIYENAGRLEDMERVRMMLVDRGLDY

SEQ ID NO: 281470 - protein, 74 aa, Glycine max
  Clone ID: PAT_MRT3847_96189C.1.pep
FHFPQILVASTHSPPVRRQQHTSFSCCTSHHPPFGPCTILGTLLAFTWMCNMLFQFPSFLVLKTSSRFLQSLAC

SEQ ID NO: 281471 - protein, 134 aa, Glycine max
  unsure (1)..(134): unsure at all Xaa locations
  Clone ID: PAT_MRT3847_9618C.1.pep
MDLSHPQSNLSLGFSSSHASPPRRSDPPVPLQLMEPQTENGNNLDVESDDDDDDKEVEEFXILGHSMCLKRRRDCDSSSSSAGGGKRGSVEPDLYARKAAVRARGCQPLSIGGSDIHEIMGKEKKRAFWGGELI

SEQ ID NO: 281472 - protein, 35 aa, Glycine max
  Clone ID: PAT_MRT3847_96190C.1.pep
YVLILIREGLNEGKDEKERIVLSSEVIIKNRKVSI

SEQ ID NO: 281473 - protein, 61 aa, Glycine max
  Clone ID: PAT_MRT3847_96191C.1.pep
AHIKHIGLVPTMGLLHSGHLSILGPGPTTLQHRRRHHLREPGPFLPHGGPMHLPLLLRLRL

SEQ ID NO: 281474 - protein, 58 aa, Glycine max
  unsure (1)..(58): unsure at all Xaa locations
  Clone ID: PAT_MRT3847_96192C.1.pep
SLGMPLQLHYXRHTHTQEEEKKKXRKINHAMIHKYDEINSDWGVGWFLRHQKKRKEEL

SEQ ID NO: 281475 - protein, 50 aa, Glycine max
  Clone ID: PAT_MRT3847_96193C.1.pep
VPLVAYSSLSNTNLMQANQIKSKVKGSDSRAVAPIKHTFLHRKHRVYFSS

SEQ ID NO: 281476 - protein, 87 aa, Glycine max
  Clone ID: PAT_MRT3847_96194C.1.pep
MTTPARKRLMRDFKRLHQDPPAGNTGAPQDNNIMLRKAVVYGPDDTPWDGGTLKLALQSTEDYPNKPPTVRLVTGMCHPNIYADGSI

SEQ ID NO: 281477 - protein, 60 aa, Glycine max
  Clone ID: PAT_MRT3847_96195C.1.pep
KNPTYFCQLYKTNASYVNSRHLYPNNLRLQMVKCKRHEIKNEIFTLRWIKNDRNDTIKIN

SEQ ID NO: 281478 - protein, 97 aa, Glycine max
  Clone ID: PAT_MRT3847_96196C.1.pep
ERTSLSFFFFPSFCVRSLDSAKPCSHWFIVVLWSVITALKLAKEKGVSQLWIETDCTPVMDCILNKRVQKGVPFAPLVESILELMTNFDGSSLPLLS

SEQ ID NO: 281479 - protein, 99 aa, Glycine max
  Clone ID: PAT_MRT3847_96197C.1.pep
RQLQLRPLRPPEEGPQLHRQNPRLHRRCNSRFVSLRCLRPFRGRAQSPKAFVESPSRAGRSTILMNVFPLSIGPNQMKKWIRMCSMRPIRIWIWTPMRA

SEQ ID NO: 281480 - protein, 55 aa, Glycine max
  Clone ID: PAT_MRT3847_96198C.1.pep
PMNKFSKRTRVTILFQTNCNYLGFTLKINLGPFFLLQFLYYNSFKGQGSKLYTLR

SEQ ID NO: 281481 - protein, 66 aa, Glycine max
  unsure (1)..(66): unsure at all Xaa locations
  Clone ID: PAT_MRT3847_96199C.1.pep
FLNKICILLFGGVQKTRIXXSGGLCGPLAFLKTEKLYPVTTNTLYSFEGHKSQKAKTYYLMTTPRL

SEQ ID NO: 281482 - protein, 95 aa, Glycine max
  Clone ID: PAT_MRT3847_9619C.1.pep
AAGPKGKCCVTFFTLDSKSKLYLDLTKTGFNFTPFRLIIIRVWRFKGEREVADRNGIPLALGLSAMLLFFMATSSSLPSFELPMTPTTRSCTSHS

SEQ ID NO: 281483 - protein, 28 aa, Glycine max
  Clone ID: PAT_MRT3847_961C.1.pep
PNLSTHFPFPRQHTCFENLKATTTLLRE

SEQ ID NO: 281484 - protein, 538 aa, Glycine max
  Clone ID: PAT_MRT3847_96200C.1.pep
MTYYNNSDQVEKLRLVLTLLCCVHFHVQSSLGFEDGISRSQFPEGFLFGTCTSSYQIEGAPLEDGKGLSNWDVFSHIPGNINNDENGDIADDHYHRYLEDIELMSSLGINVYRFSISWARILPRGIYGDINPSGIMFYNKIIDNLLLRGIEPFVTIHHYDYPEELEERYGAWLSPLIQRDFVHFAEVCFKSFGDRVKYWTTINEPNLFADFGYMEGTYAPGHCSPPFGNCNTGNSDVEPLIVMHNMLLSHAKAVELYRKHFQAKQGGTIGIVAFSFMYDPLRDEECDRQAVKRALAFVVAWSLDPLVFGEYPPEMHSILGSQLPRFSPEEKSLIKGSIDFIGINNYGTLYAKDCSLTACPLGTDRPIRGFVEATGTRDGIPIGDLTGNPRFFVVPRGLEKIVDYIKIRYHNMPMYITENGYSSPHKPNVTMDDLLQDFKRIDYHKAYLAALLRSIRKGADVRGYMIWSLLDNFEWTSGYDIRFGLYYVDRGTLERIPKLSVQWFSSFLNNSSHPNITEHLSKQHIESKDVRNVGFDFI

SEQ ID NO: 281485 - protein, 76 aa, Glycine max
  Clone ID: PAT_MRT3847_96201C.1.pep
YLGKDLNQLCFCVAWICENPVYMIYELRRGAKRYCVRWYIYSDGIPCLIIRSFCLRECLDYRMQIENIGLHEKSCN

SEQ ID NO: 281486 - protein, 542 aa, Glycine max
  Clone ID: PAT_MRT3847_96202C.1.pep
MSAITNHWNKMKMLQRQLRAVLILFCCVQFHVQSCDEIEDVISRSQFPEGFLFGTGTSSYQIEGAYFEDGKGLSNWDAFSHTPGKIKKDENGDIADDHYHRYLEDIELMSSLGINVYRFSISWARILPRGIYGDINPSGVMFYNKIIDNLLLRGIEPFVTIHHHDYPGELEERYGAWLSPLIQRDFVHFAEVCFKSFGDRVKYWATINEPNLFADMGFIRGTYPPGHCSPPFGNCNTGNSDVEPLIAVHNMILSHAKAVELYRKHFQAKQGGIIGIVTHTFMYEPLRDEECDRQAVKRALAFVVAWSLDPLVFGEYPPEMHSILGSQLPRFSPEEKSLIKGSIDFIGINNYGTLYAKDCSLTACPLGTDRPIRGFVEATGTRDGIPIGDLTGNPRFFVVPRGLEKIVDYIKIRYHNMPMYITENGYSSPHKPNVTMDDLLQDFKRIDYHKAYLAALLRAIRKGADVRGYMIWSLMDNFEWTSGYGVRYGLYYVDRHTLERIPKRSVQWFSSFLNDTSHSNKQDLSEQYVRSKDVTTAGFKVV

SEQ ID NO: 281487 - protein, 62 aa, Glycine max
  Clone ID: PAT_MRT3847_96203C.1.pep
RPLQLHHVRGIPVRYSSRERDTTLTQVTAKPPGMIAPLTTLTPGGERAQCAFHVYLPTAAKV

SEQ ID NO: 281488 - protein, 72 aa, Glycine max
  unsure (1)..(72): unsure at all Xaa locations
  Clone ID: PAT_MRT3847_96204C.1.pep
KSIGPALGKVKKIVFLTRVDPFPXVALLPVLFGVKNTILSSNPPNKRLRGFLQFCKSVKYLLHECPPAFVTW

SEQ ID NO: 281489 - protein, 43 aa, Glycine max
  Clone ID: PAT_MRT3847_96205C.1.pep
GPQQRVPLFFYETRMMLYFYRHFKNQNRVSRLLLIIFPHIKLP

SEQ ID NO: 281490 - protein, 67 aa, Glycine max
  Clone ID: PAT_MRT3847_96206C.1.pep
CVCIHIQNVTFCISLEAIHYGFHVFYPLDVDFYIKKCVSKHTVSELVLILNTLHEIVVYTMLLNTLY

SEQ ID NO: 281491 - protein, 113 aa, Glycine max
  Clone ID: PAT_MRT3847_96207C.1.pep
MINAKTVLNCFLFRSNFSRVFQMQWAPVQERTKRVKPPPNLVHTPTQQEGGAAEIEKGQTPKEQGNKKKKNAGLGRNPERRKEISSLKGKPPHSGGCSKTFFLTLWGGGPNQF

SEQ ID NO: 281492 - protein, 64 aa, Glycine max
  Clone ID: PAT_MRT3847_96208C.1.pep
FDAVFSSLAFFSSPNLFWMTILAHDVFSNEKSDFNFCFLFKIYDISFLLQMLYLDKVFYFFINF

SEQ ID NO: 281493 - protein, 68 aa, Glycine max
  Clone ID: PAT_MRT3847_96209C.1.pep
SSIEATTPSCIAAPLPLRLYRSNFWISVFKFDNLLALKLLDGELFAHDQSGSIRLRIHHTLSSNVTGK

SEQ ID NO: 281494 - protein, 39 aa, Glycine max
  Clone ID: PAT_MRT3847_9620C.1.pep
QSRTCYITPLLGAFLAYSNMGRYWKIASFSTIYVLECYH

SEQ ID NO: 281495 - protein, 57 aa, Glycine max
  Clone ID: PAT_MRT3847_96210C.1.pep
LIVKETNGLAKYTWQSDVLYYSCITEGRQKCCSGYKFKEGGFFKSLMSLSIVAFCYM

SEQ ID NO: 281496 - protein, 415 aa, Glycine max
  Clone ID: PAT_MRT3847_96211C.1.pep
VESSSSLSFAMAAAARPLVTVQALDSDMATDASATVPIPDVMKSSIRPDIVNFVHSNISKNSRQPYAVSRRAGHQTSAESWGTGRAVSRIPRVPGGGTHRAGQGAFGNMCRGGRMFAPTKIWRRWHRKINVNQKRYAVVSAIAASAIPSLVLARGHRIESVPELPLVVSDSAESVEKTKEAIKVLKQIGAFPDAEKAKDSRSIRPGKGKMRNRRYISRRGPLIVYGTEGAKAVKAFRNVPGVEVANVERLNLLKLAPGGHLGRFVVWTKSAFEKLDSIYGSFDKPSEKKKGYLLPRPKMVNSDLARIINSDEVQSVVRPIKKDVKKATLKKNPLKNLNSMLKLNPYAKTAKRMALLAEAQRVKAKKEKLDKKRKTVSKEEASAIKSAGKAWYHTMVSDSDYTEFDNFSKWLGVSQ

SEQ ID NO: 281497 - protein, 52 aa, Glycine max
  unsure (1)..(52): unsure at all Xaa locations
  Clone ID: PAT_MRT3847_96212C.1.pep
ISPTQHFYKLKSLHHGCLVCFLCHCSCCHLHXKASLFFFTCPLLVSCIIVNH

SEQ ID NO: 281498 - protein, 42 aa, Glycine max
  Clone ID: PAT_MRT3847_96213C.1.pep
HFPGLISYTSIIYCGRRPERVGQDAEYYKNKPSSNINAILDV

SEQ ID NO: 281499 - protein, 42 aa, Glycine max
  Clone ID: PAT_MRT3847_96214C.1.pep
RLREHNTKVKGARSRGSRLTIPYMRRHNSSIVTPKYNSLVCC

SEQ ID NO: 281500 - protein, 70 aa, Glycine max
  Clone ID: PAT_MRT3847_96215C.1.pep
EPLLLFKISCFIWKFGDCVTLIMVVIHKYNCVLCPVILLSWAISCFTFVALLCNQSTYIAIGNWVFYDRK

SEQ ID NO: 281501 - protein, 93 aa, Glycine max
  Clone ID: PAT_MRT3847_96216C.1.pep
FAFDKKKKKKKKKKKKKKKKKKKKNKKKKKKKKKKEKIKKKIKEKTIKITKRVSFNKNVIILTIDEKDNLLKRIIITNDPTWKMNSGMGNIIN

SEQ ID NO: 281502 - protein, 59 aa, Glycine max
  Clone ID: PAT_MRT3847_96217C.1.pep
RRYFTRPTVDRLFYSSNSIRGNIRPYCESALQRSCADGQSVNFVERANTNTLCLSRARA

SEQ ID NO: 281503 - protein, 102 aa, Glycine max
  unsure (1)..(102): unsure at all Xaa locations
  Clone ID: PAT_MRT3847_96218C.1.pep
FGSRVPSEFNPKNXLDFVCRAHPFVQEGLKYMFQNKGLVIVWFAPKYCSRGGKVAFFLGFHENMEKEVLFFPPPGGTHQMRGPRPGVPYFLKGGANFCLNFL

SEQ ID NO: 281504 - protein, 42 aa, Glycine max
  Clone ID: PAT_MRT3847_96219C.1.pep
WLPSLCQFNAQATKKSKPLLVAFYEIRFLGIWGNHSLALVGL

SEQ ID NO: 281505 - protein, 69 aa, Glycine max
  Clone ID: PAT_MRT3847_9621C.1.pep
EWLKGGFSKARSYNHLMQFNRQLKRCVYYLNAWIKCSYPGSELKKGFELPEQDGGIGWERLQSMVRDRA

SEQ ID NO: 281506 - protein, 111 aa, Glycine max
  Clone ID: PAT_MRT3847_96220C.1.pep
LFQSSVTMSGQVKTIARILQAAGSAIQANGNLVLLNVENGHLVERIFDGEELKDQRLVVDGVKSGAFAAFVVSDNHALILYITDGGELKAREFDPDSKEWDESELNGLGEI

SEQ ID NO: 281507 - protein, 144 aa, Glycine max
  Clone ID: PAT_MRT3847_96221C.1.pep
RECPCRYLFSHGDSAADPLSGGQLPWVPTPDLFFLRGLCLTLRPWFPHCVSFDALVIASPSDLRLLWVHWPALVGLELHGLDVFMSPQPANCALPNAIPSATLPHSETTEEFEVQNSIKVKEEGTAANDNTKVCVSSFRELEYP

SEQ ID NO: 281508 - protein, 43 aa, Glycine max
  Clone ID: PAT_MRT3847_96222C.1.pep
VNIPSRMEHYHCTFTDPISSVGAQNCLGTGNYAELKAQSFTDL

SEQ ID NO: 281509 - protein, 80 aa, Glycine max
  Clone ID: PAT_MRT3847_96223C.1.pep
MASATTSATITVGAISRVAGPKERERNVHFIKGLNSFGGLKAQNSVTSLGLPVCTEQCFADVESPLKYQSSSKAKCGGAA

SEQ ID NO: 281510 - protein, 101 aa, Glycine max
  unsure (1)..(101): unsure at all Xaa locations
  Clone ID: PAT_MRT3847_96224C.1.pep
PSPTITTILAISSVFVGAXGGLNQTQTRKIIAYSSIAHIGXNTAILPYNPNLTLLNLTIYILLTVPIFITLITNSATTINTLITNSAPSSSRIPSLRTRAC

SEQ ID NO: 281511 - protein, 471 aa, Glycine max
  unsure (1)..(471): unsure at all Xaa locations
  Clone ID: PAT_MRT3847_96225C.1.pep
MSETGNPVLFHFPHPQPQPLITLKNTHADLDSLLSISNAMDPWLDDLTDDLQSLSFASTATADIKRSTSFGSETTTLTASSSAHLPANSKPHAPSSDPRWAAIHRIRSDSPSRRILPSDLLFSRRLGSGDISSVYLAELNDGSLSVMFAAKVMDKKELASRSKEGRAKTEREILESLDHPLLPTLYATIDATKWLCLLTEFCPGGDLHVLRQRQPHKRFXGIVYRDTRPENELVRSDGHFMRTDFDLSLKCDDSTSTPQIILDQKNTPHKDPRVDPSQSQFTSSSCILPSCIVPAGACFHPKRKRKKKQTQHNGPEFVAEPIDVRSMSFVGTHEYLAPEIVSGEGHGSAVDWWTLGIFIFELFYGVTPFRGMDNELTLANIVARALEFPKEPSVPPTAKDLISQLLVKDPSRRLGSTMGASAIKHHPFFQGVNWALLRCTPPPYVPPPYIKEAVSSDHEIETCPQTPIDYY

SEQ ID NO: 281512 - protein, 59 aa, Glycine max
  Clone ID: PAT_MRT3847_96226C.1.pep
VRNSRADPRVSGCDSTAERELKTETALMRSRRFDLTFHPSIRGTMAGSHAGVTEVLDDG

SEQ ID NO: 281513 - protein, 114 aa, Glycine max
  Clone ID: PAT_MRT3847_96227C.1.pep
RKMGPAPDTIDLEGYDDVRAILKPKGSNSKDCRLERRWKRFENSGSNKQLKHNHSDSGTRSTVKSHGKVASLTIKKGHMSEDEVDEDYKFFLLTYDPHIDVVSDSDVDGSDDDI

SEQ ID NO: 281514 - protein, 38 aa, Glycine max
  Clone ID: PAT_MRT3847_96228C.1.pep
MKLVLKFKNGNIAHPLMNEKISKITKRDKNKKKKKAAV

SEQ ID NO: 281515 - protein, 209 aa, Glycine max
  Clone ID: PAT_MRT3847_96229C.1.pep
MATLLLPNPFSTKLPAQRYSHRRFTCSSITAQSRSAKEQLLALIADQDRGIKTQSDPAKHAAIVEAINAMAAAGEGSVTTGDALSATWRLLWTTEKEQLFIVEKAPLFGTQAGDVLQVIDVRNRTLNNVITFPPDGVFIVRSTIEVASPQRVNFRFTSAVLCGKNWEIPLPPFGQGWFDIVYLDDDLRVVKDIRGDYLVVDRASYDWKE

SEQ ID NO: 281516 - protein, 65 aa, Glycine max
  Clone ID: PAT_MRT3847_9622C.1.pep
NKRMLIYVLFYYKILIHNCYLAHQLKIYFFMFYMYFKIILENILFFLLIYDIKHYLFFLLHIIIN

SEQ ID NO: 281517 - protein, 124 aa, Glycine max
  Clone ID: PAT_MRT3847_96230C.1.pep
RIRVVLAPQKHKHTANRSFHVNSSNLSHSFQRSERTQPVKASEISGDWEQETESKIIANCKDLSATSKTIYASNLAYSMEKDDMEFLFKNCGEIVDIRLHTDHNGRFKGHGHVEFATTEAAQKA

SEQ ID NO: 281518 - protein, 90 aa, Glycine max
  unsure (1)..(90): unsure at all Xaa locations
  Clone ID: PAT_MRT3847_96231C.1.pep
DIVXVNGKFDPNSDIDVINLDLVFSYLDQIEKRIDKLNKGKAKDSQKLKEEAEKSALEKIXEALMDGKPARSVTLTDFEKDAVKXLCLLT

SEQ ID NO: 281519 - protein, 58 aa, Glycine max
  Clone ID: PAT_MRT3847_96232C.1.pep
CNSLQNSHLECLDLNLRSVDFVEDPTQTNDMIKIMHIIINELVYSIELAHKSTHSDPQ

SEQ ID NO: 281520 - protein, 60 aa, Glycine max
  Clone ID: PAT_MRT3847_96233C.1.pep
INFHLEISFKNGYDFINKSCKILHDFNFKKGDLATRSSISIYDFCLQNHNYIYNLFLNEN

SEQ ID NO: 281521 - protein, 51 aa, Glycine max
  Clone ID: PAT_MRT3847_96234C.1.pep
KIKNKVVDPLNRGFQSGNINSAGSKLVGCNSIGKENLKSVRSNVHTGADTV

SEQ ID NO: 281522 - protein, 465 aa, Glycine max
  Clone ID: PAT_MRT3847_96235C.1.pep
MMAHLLHTPFIPSSSALRRAAPIPHRKTTTPLVVRAKIREIFMPALSSTMTEGKIVSWTKSEGDKLSKGDSVVVVESDKADMDVETFYDGYLAAIVVEEGGVAAVGSPIAFLAETEDEIPQAKSKASSSSSSSSAPAPATAPAPAPPVESQPEKVAAPVAAAVAAPVVASSHPASEGGKRIVASPYAKKLAKELKVELGRIVGTGPMGRIVAKDVEAFAAAGNVAAAVAPALGKSAAPAGVELGSVVPFTTMQSAVSRNMAESLAVPTFRVGYTITTDALDALYKKIKSKGVTMTALLAKATALALVKHPVMNSSCRDGNSFTYNSSINIAVAVAIDGGLITPVLQDADKLDVYLLSQKWKELVEKARAKQLQPHEYNSGTFTLSNLGMFGVDRFDAILPPGQGAIMAVGASKPTVLADKDGFFSVKNKMLVNVTADHRIIYGADLAAFLQTFSKIIENPESLTL

SEQ ID NO: 281523 - protein, 190 aa, Glycine max
  unsure (1)..(190): unsure at all Xaa locations
  Clone ID: PAT_MRT3847_96236C.1.pep
MMAQLLHTPFIPSSSSALRRAATIPHRKTTSRLVVRAKIREIFMPALSSTMTEGKIVSWTKSEGDKLSKGDSVVVVESDKADMDVETFYDGYLAAIVVEEGGVAXPVGSPIAFLAETEDEIPQAKSKASSSSSSSSAPAPAPAPAPAPAQXTASGISTXKKVAAPVXAAVSAPVIASSHPASEGGKRTVA

SEQ ID NO: 281524 - protein, 147 aa, Glycine max
  Clone ID: PAT_MRT3847_96237C.1.pep
NMLHCANTSGNLAVAGDMTVLERQRARMKWQEEQGYFSGNSFNGVFSSSSLHVHDSIMVAADSGCALAEVVAQAQARSTNSSSISRTFSCPPALVEPESESKPKPKPTDSSVGKDGFKKRKPDKPHHPKVVAENDNKDKRIKFGSDD

SEQ ID NO: 281525 - protein, 65 aa, Glycine max
  Clone ID: PAT_MRT3847_96238C.1.pep
NFIFLMICYLLWGKKKKRFIFIDWANKDAFSPPFLNPRNFFFCLSPGKLKQNLDLNNLTTPLGKI

SEQ ID NO: 281526 - protein, 58 aa, Glycine max
  Clone ID: PAT_MRT3847_96239C.1.pep
EKVSKFHIFKSGGGQGSEPPKQKGALTFFKTNDWIFWPFKKGLGLVYLFVFCPKGYPQ

SEQ ID NO: 281527 - protein, 206 aa, Glycine max
  Clone ID: PAT_MRT3847_9623C.1.pep
MVSGSGICAKRVVVDARHHMLGRLASIVAKELLNGQKVVVVRCEEICISGGLVRQKMKYLRFLRKRMNTKPSHGPIHFRAPSKIFWRTVRGMIPHKTKRGEAALARLKVYEGIPPPYDKIKRMVVPDALKVLRLQKGHKYCILGRLSSEVGWSYYDTIRELEKKRKEKAQLVYERKKQLNKLRVKAEKVAEDKLGSQLDILAPVKY

SEQ ID NO: 281528 - protein, 212 aa, Glycine max
  Clone ID: PAT_MRT3847_96240C.1.pep
QRKENKKKVCFWNCLQLDEYSLMAIEMNAQINMVKFAHQHLSTFRDAQGTYVYPGSDVPQWLDHKTRHGYDDDYVTIAPHSSHLGFIFGFIVPEVPYGGSNLKLKITTGAEGEEGNSIIVYLERPHYGIKSNHVYLMYDQACSHFLNSRAKHHPMLKIKVTVASQTLTSQYVPLQIRGFGVSTINSFPQIEELVYSSSKENSDVYPVSVWNG

SEQ ID NO: 281529 - protein, 69 aa, Glycine max
  Clone ID: PAT_MRT3847_96241C.1.pep
FRYSLLLQATSALDAVSERLVQDALNHLMKGRTTLVIAHRLSTVQNAYQIALCSEGRIAELGTHFELLA

SEQ ID NO: 281530 - protein, 117 aa, Glycine max
  unsure (1)..(117): unsure at all Xaa locations
  Clone ID: PAT_MRT3847_96242C.1.pep
INSNTMIYISLYPMGRAKEIWGEDCFKFKPERWIFKQGGIIHIPFYKFIAFNPGPKSCLGKDISSLXIKMVPVFLLSNYNVPLVEGQIKSPKVSIVLQIKHGLKVKVTKKSFCDLGI

SEQ ID NO: 281531 - protein, 60 aa, Glycine max
  Clone ID: PAT_MRT3847_96243C.1.pep
PFKILLKDEFATRENERERNYCNFIVHFSTRFTFSGLIYFPSICIEILSCDKMSILWLSF

SEQ ID NO: 281532 - protein, 52 aa, Glycine max
  Clone ID: PAT_MRT3847_96244C.1.pep
LQPKLAYTSIKPCKFKRPCFSINPKKLTRNKPVLTSKRVGAYTIGGLKQTGF

SEQ ID NO: 281533 - protein, 122 aa, Glycine max
  Clone ID: PAT_MRT3847_96245C.1.pep
VRQGLANSTLSLLCLRGLSLSSIAVKVSHANCDDSLETEFHVDVKNEGSMDGTHTLLIFSKPPPGKWSHIKQSVTLHKTHVPAGSKHRLNVNVHSCKHLSVVDQFGVRRIPTGEHELHIGDL

SEQ ID NO: 281534 - protein, 56 aa, Glycine max
  Clone ID: PAT_MRT3847_96246C.1.pep
KRTKWYYLEGEPPYKKKVGKQNRKASSTGASFLLKPKNLNEGFGCLISSFIIFPMP

SEQ ID NO: 281535 - protein, 99 aa, Glycine max
  unsure (1)..(99): unsure at all Xaa locations
  Clone ID: PAT_MRT3847_96247C.1.pep
MEFLFLVISFTILGGVAIAGGSPIHPLLPDANYWEAIWPNTPIPTALLELLKPLPACVEIDELPKQIDDTQYPKTFFYKEDLYPCXTLNVQFTNRSYAQ

SEQ ID NO: 281536 - protein, 252 aa, Glycine max
  unsure (1)..(252): unsure at all Xaa locations
  Clone ID: PAT_MRT3847_96248C.1.pep
RDLSKNKSTASMVHCVILPYPSQGHINPMHQFSKLLQLQGVRITLVTTLSYSKNLQNIPASIALETISDGFDNGGLAEAGSYKTYLERFWQVGAKTLAELLEKLGRSGNPVDCVIYDSFFPWVLDVAKGFGIVGAVFLTQNMFVNSIYYHVQQGKLRVPLTKNEISLPLLPKLQLEDMPSFLSSTDGEEFXLLDLAVAQXSNVDKADWILCNSFYELEKEVNNWTLKIWPKFXTIGPCITSMVLNKRLTDDN

SEQ ID NO: 281537 - protein, 33 aa, Glycine max
  Clone ID: PAT_MRT3847_96249C.1.pep
WKVSNSCNRESWIYLVIIYISSYIIKLKGTQFL

SEQ ID NO: 281538 - protein, 73 aa, Glycine max
  Clone ID: PAT_MRT3847_9624C.1.pep
YFFFLFIFFYLFVCLFVFLEKERGKFLLEKTKCCCNRRLKKQKVRWASKICRNPRPPTPRGGHEDEHEEYPGN

SEQ ID NO: 281539 - protein, 134 aa, Glycine max
  Clone ID: PAT_MRT3847_96250C.1.pep
CFGFFYLFFFFFFFFFFFFFFFFGKKNIFSLKIKQTQTWFNSPLIWPSKGKCPSHKGGQFHSIKFPHPISLFSPGPHFPLNKSFGQNSSPWGGLLAFSPIFLAFSPRVLPWGGGWSPAPPGARAFLKAWAPKGA

SEQ ID NO: 281540 - protein, 54 aa, Glycine max
  Clone ID: PAT_MRT3847_96251C.1.pep
SKIYGGTMGYFVDIRTHIMSKVLTTLKDTSPDINCQWLFLPYSFSIRSHVPLTY

SEQ ID NO: 281541 - protein, 81 aa, Glycine max
  Clone ID: PAT_MRT3847_96252C.1.pep
MAVQISKKRKFVADGIFKAELNEFLTRELAEDGYSGVEVRVTPTRTEIIILATRTQNVLGEKGRRIRELTAVVQKRFGFPE

SEQ ID NO: 281542 - protein, 165 aa, Glycine max
  unsure (1)..(165): unsure at all Xaa locations
  Clone ID: PAT_MRT3847_96253C.1.pep
MALSSKHPHLFNHIRTFVNAKVKWVRDPYLDNAVLKEKDLKQTISLKNQIISSPSKSLSIYAASQLKASLYLPTTTTKFIDKYHCIXTQFQPGPGLPPVVKLTPQALSLHXEEMAVYKTPINREDTGQRLARLLMLAGMEKNASYVFEKLNGNGDFSWICDTPFG

SEQ ID NO: 281543 - protein, 70 aa, Glycine max
  Clone ID: PAT_MRT3847_96254C.1.pep
DVAGLIGFPPCLSISALPFLWFLALPSPVIVFPVKVCCRSASPSYLVLAHGSSFSLLAMHRVRLSSLCPR

SEQ ID NO: 281544 - protein, 104 aa, Glycine max
  Clone ID: PAT_MRT3847_96255C.1.pep
SASHRRLHNLHRARAAPTGTITALTSHAHQICALEPRTPTSTISSVPSPHVANPYATRFAHDFPPKHSFSFSFLVFFLVFLFIVLYCFVMLFVCLIWLLVIVLL

SEQ ID NO: 281545 - protein, 49 aa, Glycine max
  Clone ID: PAT_MRT3847_96256C.1.pep
KFIKLMSPIIHKYLSIESFFHLQCLNRELGSWIPCTFKGAKDLEIIKLC

SEQ ID NO: 281546 - protein, 201 aa, Glycine max
  unsure (1)..(201): unsure at all Xaa locations
  Clone ID: PAT_MRT3847_96257C.1.pep
PASGPLSGQAGINIPEYPTRRRSXPVYTVAGRIIDFEKRFPKEISLGEDIEAHGFWLMDVNTNSMAMQSDDIQAWEKMRGGASKLMGKYAVQTCGYYPEVQVGPKGHRVRNCQAFKHQIRDGQRAWXGATIDDLAPPVYVYHIRDDQHRKPLVNELKRYYGMLPAVVELFAQAGAPVDKNYASMMREDVVIPEMDEEKLVV

SEQ ID NO: 281547 - protein, 377 aa, Glycine max
  Clone ID: PAT_MRT3847_96258C.1.pep
MQQKFCRMEEVQESQTQSSLGQEEENEVITESSAFVKGEPAPEFSSNPPKVDSEVEVLHEKVSKQIIKEGHGQKPSKYSTCFFHYRAWAEKSQHKFEDTWQEQRPIEMVLGKEKKEMTGLGIGVASMKAGERALVRVGWELGYGEEGSFSFPNVPPKADLVYEVELIGFDETKEGKARSDMTVEERIGAADRRKMDGNALYQEEKLEEAMQQYEMAIAYMGDDFMFQGCERRQKGALAVKNPCHLNMAACLIKLNRYEEAIGQCSIVLGEDENNVKALFRRGKARAALGQTDTAREDFLKASKYAPQDKAIAKELRLLAEHDKAVYQKQKEIYKGIFGPRPQPVPKPRNWLILIWQWLLSVFYGLVTLFKRQRHKSD

SEQ ID NO: 281548 - protein, 82 aa, Glycine max
  Clone ID: PAT_MRT3847_96259C.1.pep
MEEVQESQTQSSLGQEEENEVITESSAFVKGEPAPEFSSNPPKVDSEVEVLHEKVSKQIIKEGHGQKPSKYSTCFCKYHTQS

SEQ ID NO: 281549 - protein, 141 aa, Glycine max
  Clone ID: PAT_MRT3847_9625C.1.pep
CQSPVTSPAHEHCSWSVFLSSPHRSLRKSSSRLPVLICPPRLSHPHNLTNNRSQGSNHRLTSVQDTLFRNNYDANGLSTCNWCSFSGHHRTHSNKHLWFQNMANLRCLGNQLCQVLSQCCTGPTHPTNWDGPLAIPSKEQE

SEQ ID NO: 281550 - protein, 273 aa, Glycine max
  unsure (1)..(273): unsure at all Xaa locations
  Clone ID: PAT_MRT3847_96260C.1.pep
PTRPPTRPPTRPKKEMTGLGIGVASMKAGERALVRVGWELGYGEEGSFSFPNVPPKADLVYEVELIGFDETKEGKARSDMTVEERIGAADRRKMDGNALYQEEKLEEAMQQXIAYMGDDFMFQLFGKYRDMALAVKNPCHLNMAACLIKLNRYEEAIGQCSIVLGEDENNVKALFRRGKARAALGQTDTAREDFLKASKYAPQDKAIAKELRLLAEHDKAVYQKQKEIYKGIFGPRPQPVPKPRNWLILIWQWLLSVFYGLVTLFKRQRHKSD

SEQ ID NO: 281551 - protein, 58 aa, Glycine max
  Clone ID: PAT_MRT3847_96261C.1.pep
SSRIGSSTAARRRQIRHLVSFTHLTNSASSDKTATTLHKATENQMGMDHKILSINVPH

SEQ ID NO: 281552 - protein, 42 aa, Glycine max
  unsure (1)..(42): unsure at all Xaa locations
  Clone ID: PAT_MRT3847_96262C.1.pep
MVNMWLLVYVXXQPNHLIASNKCFLPHTGKQXXNKNGLIFCA

SEQ ID NO: 281553 - protein, 37 aa, Glycine max
  Clone ID: PAT_MRT3847_96263C.1.pep
SLQHHGTTRGAIMSKHLPLLVGVNPIFCGTKNSILSF

SEQ ID NO: 281554 - protein, 83 aa, Glycine max
  unsure (1)..(83): unsure at all Xaa locations
  Clone ID: PAT_MRT3847_96264C.1.pep
SLWGGAPCPAPRSRCPPCSRVALQEAGSLPPPRVLXRRRCLCWPFRLPVXRCSRGSLCVVVGRRWLCPSSPSPLSGRGLGSGG

SEQ ID NO: 281555 - protein, 46 aa, Glycine max
  Clone ID: PAT_MRT3847_96265C.1.pep
KKTGLNSSREKLVPYFQKRRGNTFEILQRTQQGHITIPCGGKYKSW

SEQ ID NO: 281556 - protein, 101 aa, Glycine max
  unsure (1)..(101): unsure at all Xaa locations
  Clone ID: PAT_MRT3847_96266C.1.pep
SXGLXXXVLXCVXCXXLXXXLMXXIFXQYLXSISXCFXXXFXXCCXXCIXXXVGLXXXXLXXCXCLGVVFXVFWXCCVXXXVLXGXXVIXXVXCXXXXXXX

SEQ ID NO: 281557 - protein, 75 aa, Glycine max
  unsure (1)..(75): unsure at all Xaa locations
  Clone ID: PAT_MRT3847_96267C.1.pep
PYLILEFGFCVTRKXHXTPSGRXXPXAXGVIXSLCCPHHSATLKFXXXXXLXXCXXXCVRPWXPAFXSXGCLXXI

SEQ ID NO: 281558 - protein, 196 aa, Glycine max
  Clone ID: PAT_MRT3847_96268C.1.pep
FGSRVADFGLAKLVGRDFSRVLTTMRGTRGYLAPEWISGVAITAKADVYSYGMMLFEFVSGRRNSEASEDGQVRFFPTIAANMMHQGGNVLSLLDPRLEENADIEEVTRVIKVASWCVQDDESHRPSMGQVVQILEGFLDVTLPPIPRTLQAFVDNHENVVFFTDSSSTQTSQVKSNASAASSQAKSNISSSNSST

SEQ ID NO: 281559 - protein, 234 aa, Glycine max
  unsure (1)..(234): unsure at all Xaa locations
  Clone ID: PAT_MRT3847_96269C.1.pep
VFDHASGERLQIFLQSSDLYDPEEVLDLIEGSELWLEKAILYRRLGQETLVLQILALKLEDSEAAEQYCAEIGRADAYMQLLEMYLDPQDDKDPMFTAAVRLLHNHGESLDPLQVLEKLSPDMPLQLASDTLLRMFRARVHHHRQGQIVHNLSRAVDIDARLSRLEERSRNVQINDESLCDSCDARLGTKLFAMYYDXVYISNLKHRRQGESVSVSGRNFKEDILIKPGWLVSR

SEQ ID NO: 281560 - protein, 402 aa, Glycine max
  Clone ID: PAT_MRT3847_9626C.1.pep
MAKAQQALPEELIVEILSWVPVKPLMRFKCVSKTWNSLIFHPTFVKLHLQRSSTNTHVLLTPEEEEDPPDDDEKVTDGLQRAATPCSVLRLLEENPSPAPHDDHYQFNDVYSFVGSCNGLICLRFFTVSGRGNFEYWVRFWNPATRITSQESPHLRLRRRDYMLLEDYVKFGFGYDDVSDTYKVVALVFNTKSQNWEVKVHCMGDTCWINILTCPAFPISRRLLDGHLVSGTVNWLAFRMLGIDYEWNNVTVHQLVIFSYDLKKETFKYLSMPDGVSQVPDYPPKIGVLKGCLSLSYTHRRRTHFVVWLMRQFGVEKSWTRLLNVSYLNFQLSPTNELDWLPTTPLCISENDDMMLLANCVYDEFVLHNRRDNRIDSIGSFDGKVPMCSYDYVPSLVLPYCN

SEQ ID NO: 281561 - protein, 77 aa, Glycine max
  Clone ID: PAT_MRT3847_96270C.1.pep
QKKTEGERGRNYLASTVALGPSFSTVSQSLSKKRVLSSLSERGPLFRTWTPHSRTFAPQYIPPFDEFACPFTVSTRT

SEQ ID NO: 281562 - protein, 56 aa, Glycine max
  Clone ID: PAT_MRT3847_96271C.1.pep
KQKFFFYLQGKEHSIKNFYGALYATGLYILQRCEIKLKFPGQRMKHFILAPYKHFI

SEQ ID NO: 281563 - protein, 65 aa, Glycine max
  Clone ID: PAT_MRT3847_96272C.1.pep
PQKQQRAHGLSSYGLTFIENKEPQLRYLKEVTHISYCYYSQKYHRSVKKKGYFTEQQRPLDAVGD

SEQ ID NO: 281564 - protein, 64 aa, Glycine max
  Clone ID: PAT_MRT3847_96273C.1.pep
PPFGTHFSTVVTSSVFKSRVLICPSRCPPFFLSFLFFFLSYSRKGMITKSMLIQILEFGSFNCC

SEQ ID NO: 281565 - protein, 83 aa, Glycine max
  unsure (1)..(83): unsure at all Xaa locations
  Clone ID: PAT_MRT3847_96274C.1.pep
FSGFLGTEHDGXEPSLGGIQNHAPPMMPIDEEIFPKVAHHYGEDWPDCCDEEVGISEAHPISLGYQSGHWMDRHSNAGRSGYN

SEQ ID NO: 281566 - protein, 77 aa, Glycine max
  Clone ID: PAT_MRT3847_96275C.1.pep
PGESSFQLNRDLDLQSRMAAVDPSGKGPFDFLVVTGGSLFPPGKKTLFIVNVYKVIVKFDLKRSYRSELRKVLFWEK

SEQ ID NO: 281567 - protein, 44 aa, Glycine max
  Clone ID: PAT_MRT3847_96276C.1.pep
ATGKNIKSVNCFFFFNSHRIMVLDQLTPLYGRRMPLIFQNNTTI

SEQ ID NO: 281568 - protein, 106 aa, Glycine max
  Clone ID: PAT_MRT3847_96277C.1.pep
YCVNEAGVYSIYIATLFLCAWTERSSFFFCSLHLYHPCLKGLYAYCLKLNLHNMMLSTKKGYATDERLKEVSMVLEIFSHIRASIIEQLSIVASNRTPLYTLLIFT

SEQ ID NO: 281569 - protein, 27 aa, Glycine max
  Clone ID: PAT_MRT3847_96278C.1.pep
NVRVIINYIAPRTISKAETYSLSAESP

SEQ ID NO: 281570 - protein, 55 aa, Glycine max
  Clone ID: PAT_MRT3847_96279C.1.pep
LQSPLAHLNCSFFGLRNSLKHLHCTGCEWSCFVPHFLVIWPNCSPHLTSWFCGGE

SEQ ID NO: 281571 - protein, 142 aa, Glycine max
  unsure (1)..(142): unsure at all Xaa locations
  Clone ID: PAT_MRT3847_9627C.1.pep
AADVYIGANPSADGGGEDEGVDDAAAKGDDIVDTFRLQEQPECDKKQIDSFMMRYIKNMTPKLDAXQQELIKKHIXGATEYLLSKIKDVQCFVGESMGDDARLVFAYYEDGSADPTVLYLAYALKEVKCSVTYCTELSTYNV

SEQ ID NO: 281572 - protein, 134 aa, Glycine max
  Clone ID: PAT_MRT3847_96280C.1.pep
IASRRVRGTLQFCLSLSRALSLSLSHTHKTHTYHPYTFLIMSGSINPFDAPDEEYANPYEPPGGSHKLNSKSTYGRVPSDATPLVPLTNISLSSSSSPYANVASGRMDGGLDDREATLRAREEAVAEKERQLRI

SEQ ID NO: 281573 - protein, 134 aa, Glycine max
  Clone ID: PAT_MRT3847_96281C.1.pep
SAATDLRRKDPDLYKRNGIFPMLKRNSTVKLAPQRWQENAADGSFDVVVTFEEKVFDMVIEDLHNRDHALLKTVLVINLEVKDNHDEAAVGARLTLDLCREIEAAESWEESIDEIIAGFENKHRRKLLYSISFY

SEQ ID NO: 281574 - protein, 263 aa, Glycine max
  Clone ID: PAT_MRT3847_96282C.1.pep
IGNACWELYCLEHGIQPDGQMPSDKTIGGGDDSFNTFFSETGAGKHVPRAVFVDLEPTVIDEVRTGTYRQLFHPEQLITGKEDAANNYARGHYTIGKEIIDLVLDRIRKLADQCTGLQGFLVFHSFGGGTGSGFTSLLMERLSVDYGKKSKLEFSIYPAPQVSTAVVEPYNSILTTHTTLEHSDCAFMVDNEAIYDICRRNLDIERPTYTNLNRLIGQIVSSITASLRFDGALNVDLTEFQTNLVPYPRIHFPLATYAPVISA

SEQ ID NO: 281575 - protein, 180 aa, Glycine max
  unsure (1)..(180): unsure at all Xaa locations
  Clone ID: PAT_MRT3847_96283C.1.pep
MLLSYSLHLPITSSYSHTSNRSPNSSGYIKFRTRYRENLRYLRALTIIDPKTKPEDLPLPNDVDHIIDTLTFLKSHSFSDADIPRLKFLTPELFTTAVVPSDVSAVFRFLADDLAATKSESRDLILRCPKLLFLHVDLCLRPTLQXXPAVVXGWVQGLNRPTTRNAHLLNTRVDKLHAKV

SEQ ID NO: 281576 - protein, 73 aa, Glycine max
  Clone ID: PAT_MRT3847_96284C.1.pep
IVKITLNFDWFSIIWHKHEHKPIQHTHGSLQVTLNLNPANCSLLFGGKNCSSHSHQLSFFQLHTHSLGWTAFR

SEQ ID NO: 281577 - protein, 44 aa, Glycine max
  Clone ID: PAT_MRT3847_96285C.1.pep
YYLQQTKNEGNTMVLVAKCRHTLEAFLLKIHAEGAAHLSTMQEG

SEQ ID NO: 281578 - protein, 42 aa, Glycine max
  Clone ID: PAT_MRT3847_96286C.1.pep
MASGATCVQRLDGSRDSAIHTKYRISLRSSSMQEPRYPLPRV

SEQ ID NO: 281579 - protein, 159 aa, Glycine max
  Clone ID: PAT_MRT3847_96287C.1.pep
LFHTLPIFLCIIFFTSTTTSTTLPPSSPSFPSGLSYHIDCGSPTNSTDQFNTTWLSDRYFQRGATGIVSEPLRFRHGHEKTLRFFPISSGKKNCYTIPNLPPSRYLLRTFVVYDNYDGRSHPPSFDVAIAATVVFSWRSPWPQSLARDGAYADLFATIT

SEQ ID NO: 281580 - protein, 48 aa, Glycine max
  Clone ID: PAT_MRT3847_96288C.1.pep
TRVRVLIGNRFVFIFCVVLCLSKSEVCYVCDLVLGSNFFFSHRSALWF

SEQ ID NO: 281581 - protein, 78 aa, Glycine max
  Clone ID: PAT_MRT3847_96289C.1.pep
EEHFKLKIFFLPPKHWKSLKRSPPGPSQLLTPGLDQQPLKTEKFTCQSWFAPNSKPGKKTPLKRIPGRISKNSPGQKL

SEQ ID NO: 281582 - protein, 78 aa, Glycine max
  Clone ID: PAT_MRT3847_9628C.1.pep
HARLHTGGSLPCSVMTCTTCRDADHVSSPLSLDPFQGLYLTWSKLKGGGTTRANATVGEYVYNTFRVCKTGAAGQIQI

SEQ ID NO: 281583 - protein, 51 aa, Glycine max
  Clone ID: PAT_MRT3847_96290C.1.pep
ILAILLCVTIHVTGSLMAYKRELTYYYCMAIKDAGRPCPTYKRMHEGIKLA

SEQ ID NO: 281584 - protein, 166 aa, Glycine max
  Clone ID: PAT_MRT3847_96291C.1.pep
MGKKTELKDHKEIAKVETVLELLRKQTPLTVKQEKFCNYACVKRFLKAKGDSVKKASKQLKACLAWRESVIADHLIADDFSAELADGLAYLAGHDDESRPVMIFRLKQDYQKLHSQKMFTRLLAFTIEVAISTMPKNVEQFVMLFDASFYRSASAFMNLLLPALKI

SEQ ID NO: 281585 - protein, 54 aa, Glycine max
  Clone ID: PAT_MRT3847_96292C.1.pep
FGGFSAGWLCFCGGDFFRCRAWFSFGGEISLRRVFHLRLISCVGCVGYPSGSIT

SEQ ID NO: 281586 - protein, 310 aa, Glycine max
  Clone ID: PAT_MRT3847_96293C.1.pep
MDPSSGQHQQMSSQSLENMLACSKAHQERKPTPQPEQALKCPRCDSTNTKFCYYNNYSLSQPRYFCKSCRRYWTKGGTLRNVPVGGGCRKNKRSSSSSSTSKRVQDQAFTPNVNPLTGLPSLMSYDSNDLTLALARLQKQSCGQLGYDDHDLSMLGNHHTNTPCGDNILGMHHHSSSSSTNPGFLDALRSGFLGTQSNNNMHQNMYYGYGNGDMGEVDNGGGVGVSSSGEMMMMMMPYNNDQEMSIASTQAVTVTTMKQEICNGREQKVLWGFPWQLNGDTNMGELDSGRASNWNGINSSWHGLLNSPLM

SEQ ID NO: 281587 - protein, 105 aa, Glycine max
  Clone ID: PAT_MRT3847_96294C.1.pep
MDPSSGQHQQMSSQSLENMLACSKAQQERKPRPQPEQALKCPRCDSTNTKFCYYNNYSLSQPRYFCKSCRRYWTKGGTLRNVPVGGGCRKNKRSSSSSSSTSKRV

SEQ ID NO: 281588 - protein, 157 aa, Glycine max
  Clone ID: PAT_MRT3847_96295C.1.pep
MSIDLHSHSFEAARRRQKGKNKKDLPTGAVVEAKPQLVGIHERVRSDINGSQPPTSAALGTSEGGKWVPTATNPNAEDAAELLRMCLQCGIPKTYSNARGMVCPVCGDRPPKDDTSAESKKKGSTVKDKEKSKRMKGQSSHATWKSETEMHLRQQFD

SEQ ID NO: 281589 - protein, 133 aa, Glycine max
  unsure (1)..(133): unsure at all Xaa locations
  Clone ID: PAT_MRT3847_96296C.1.pep
MTVLMPAPMDHLEVEEGLVPHADSPANTHQPMEVVAQPGLASTVESLPVGDPASCIFSWLIDNFSRVITKMLYSXRFVVGAYRWCVLIFPQGIYADYMLMYYACGRWIHFAPMAVVDVHRLAWQLVIWRILRI

SEQ ID NO: 281590 - protein, 82 aa, Glycine max
  unsure (1)..(82): unsure at all Xaa locations
  Clone ID: PAT_MRT3847_96297C.1.pep
SFTIHIISPHITIYYFLTILILHINTFLLFFIHLFLLFVXNDSSYIVLFILIFILFILNVFLFFYFILFFLFFLLFFHIFFL

SEQ ID NO: 281591 - protein, 150 aa, Glycine max
  unsure (1)..(150): unsure at all Xaa locations
  Clone ID: PAT_MRT3847_96298C.1.pep
KKRKXXKKKEXXEGGXXEEEKKXEERKEENKKAEEPKKEEEKKEERKXEEXKRDKEXKEKXAPXEXXPKXXXXXEGXXRKXXRXXKGXPGXEXXPTXXKXHKXXXKGEKAXPXKGXERXQKKSXRKGEPXXPXPKPPTEEEKKPQEEQEK

SEQ ID NO: 281592 - protein, 126 aa, Glycine max
  unsure (1)..(126): unsure at all Xaa locations
  Clone ID: PAT_MRT3847_96299C.1.pep
MGRYKFFLGGPKIKSLGRGLKTREREKPGGTQIKWLGGKSPFCRWGKKEKGPTHCPFQKMANPKGERDPPLNRAIKAGGGXVPPKGTVKLAXGLKPGSFGFFPFFFGKVGGFSPQSLKRGVPLRVP

SEQ ID NO: 281593 - protein, 121 aa, Glycine max
  Clone ID: PAT_MRT3847_9629C.1.pep
SPGAPVFLAPPPPLLFGPFVRNSPPPLDSPVFFFCGERGPVLCPLFCGGGETASFYGGFSLFSPQLSGFFPPGAPFLGGSLRVFFYPPGVVMLPSPLFFPGCCLLLPCLSRRVVLSLRLAN

SEQ ID NO: 281594 - protein, 70 aa, Glycine max
  Clone ID: PAT_MRT3847_962C.1.pep
GDIASYSFGAEPQAIPISPDKCLEQKRALLKMRYHRLKQQPQLHNMLLCCMLLYRQRSSRPPWPSCYCSD

SEQ ID NO: 281595 - protein, 79 aa, Glycine max
  unsure (1)..(79): unsure at all Xaa locations
  Clone ID: PAT_MRT3847_96300C.1.pep
LGVGCACGEWGPFIVLIAIEFCFAGLXXLFMYVAWGGVEPFGFYYFPCVHWCHCYRPDLVLWGGGRLTTGLHLWVFLLS

SEQ ID NO: 281596 - protein, 81 aa, Glycine max
  Clone ID: PAT_MRT3847_96301C.1.pep
IRHRKKVHPISYVLLEESVFFITRVIRLSFFIFSATRSPVQLTLFPHFLLPHCCCCHIFNTGRIIHDGPNSIHIHTLLEAE

SEQ ID NO: 281597 - protein, 81 aa, Glycine max
  Clone ID: PAT_MRT3847_96302C.1.pep
GKVTLWRVWIKGYGNFSILNHLWEAIRWVSFEYRCDDLVTSRTYNHGLTSMALYNFFTTHALLLSSHETCLYKNFLEGEAL

SEQ ID NO: 281598 - protein, 98 aa, Glycine max
  Clone ID: PAT_MRT3847_96303C.1.pep
ALSRRRRFRWRSTSRTGSGGTQAERACSCAKLYMTTGACIVVRAGKVRMERDYIDVNVRWRNRGDRGGRARQVEQCEASAFRRCWRALVLRTTGLILM

SEQ ID NO: 281599 - protein, 48 aa, Glycine max
  Clone ID: PAT_MRT3847_96304C.1.pep
GFLPMMPLSSSNIPWVYFTCVCSLLYLLHAHDEALSVFQHKLCGATRA

SEQ ID NO: 281600 - protein, 77 aa, Glycine max
  unsure (1)..(77): unsure at all Xaa locations
  Clone ID: PAT_MRT3847_96305C.1.pep
KPFLEDKSKVSVKXPRVKAEPNGLFFMKTFSKSASIFKNIFXEIPKRFSRAQPAKKPNGMVLPDRPAEGIRAASCCS

SEQ ID NO: 281601 - protein, 110 aa, Glycine max
  Clone ID: PAT_MRT3847_96306C.1.pep
HASVSDIAYLLQSAEEPDRHHEGVLVPSLSALARAPPHAYKRRCGCSHRRGSSTAAVICTSGYLPPRASPPRSPAARSPAPRSCAARLSAAHHPLPYYTARPSLIRSTPM

SEQ ID NO: 281602 - protein, 219 aa, Glycine max
  unsure (1)..(219): unsure at all Xaa locations
  Clone ID: PAT_MRT3847_96307C.1.pep
MAVSEEECSSANSGSGPSSSSSSASARYYLSKCVLRGSVVLQVLHAHIRSPSSNDVIFGKETSIELVVIDEDGNVQSVCDQPVFGTVKDLAILPWNEKFRVARDPQLWGKDLLVATSDSGKLSLLTFCNEMHRFIPVTHIQLSNPGNQIYLPGRKLAVDSSGCFIASSAYEDRLAXFSLSMSSGDIIDERIVYPSENERTASTSRSIQRIGXRGTIWSI

SEQ ID NO: 281603 - protein, 115 aa, Glycine max
  Clone ID: PAT_MRT3847_96308C.1.pep
GENKFFSFFLTKFGALKITGGNWFQMPFGKNPPPRQILIVLVTPFNNSRGIWAPLFLVKPYPPKLAKIFFGTFPGLKNFEAAPFRAKNFSFFGAQKRGFFFLATRGFSTFFFLFF

SEQ ID NO: 281604 - protein, 66 aa, Glycine max
  Clone ID: PAT_MRT3847_96309C.1.pep
TIWNRPMIGSTYASPVLKESIKAKAAYPNGINGIIGYHNVRQVQCNSFFANKPPDFSVIAKYAKHL

SEQ ID NO: 281605 - protein, 271 aa, Glycine max
  Clone ID: PAT_MRT3847_9630C.1.pep
MDTTLFRVVSSFQHQHQPDHDQSLNNSTTSSSSRSSRQQQNYPYPQEDEECFNFFMDEEDLSSSSSKHYCPYQPHPPSTTTIHHSFSPTPCDFEFSGKWAQDILLETARAVADKNTTRLQQLMWMLNELSSPYGDTDQKLASYFLQAFFSRISQAGDRTYRTLASASEKTCSFESTRKTVLKFQEVSPWTTFGHVASNGAILEALEGEPKLHIIDISNTYCTQWPTLFEALATRNDDTPHLRLTSVVTADATAQKLMKEIGARMEKFARLM

SEQ ID NO: 281606 - protein, 136 aa, Glycine max
  Clone ID: PAT_MRT3847_96310C.1.pep
MLSKYLAPIYTHLKWVLDFVLYYPFYMLYDSHPPINLGTELSTFHYEFSSGSEEHVDCAVCLSKFGEGDEVIRVMRCEHVFHKGCLDRWVGFENATCPLCRGSLTPKRPITNSGAEVVLFQFCSVQKCNDETWWLR

SEQ ID NO: 281607 - protein, 142 aa, Glycine max
  Clone ID: PAT_MRT3847_96311C.1.pep
INAVRAVGEQIIDVNPIELAVGNIVRRVLHIIREEDLSLVTDAVAGFGMFAGSDDEDDVERDDYPALSAASVAAAARSTSRPPSLQTLLEDVTDSAVVPPTPSSGGDSEGISRTLEKGSSGRKLKHDVIEAVNELIQDITSC

SEQ ID NO: 281608 - protein, 179 aa, Glycine max
  unsure (1)..(179): unsure at all Xaa locations
  Clone ID: PAT_MRT3847_96312C.1.pep
LAFGGVIGYRFRSXFQSXXATKRHPRDIQQLAWYRRTPFLMFIGGLVPFSAIVLQLHQAYASMWGYKIYTLPSILFATFIPVILIIALVSIGLTYIQLSAEDHEWWWRSVLCGGSTAIFMFGYCVYFYVRSNMSGFLQLSFFIGYNACLCYAFFLIFGAISFRVSLLFVRHIYHDVKRE

SEQ ID NO: 281609 - protein, 66 aa, Glycine max
  Clone ID: PAT_MRT3847_96313C.1.pep
SGVVWPMGDEPLADLDSEIWLRGTPISTSSSSSSSSSKLLIASSLVMSQIHNVFLLPFDEQPQCTN

SEQ ID NO: 281610 - protein, 72 aa, Glycine max
  Clone ID: PAT_MRT3847_96314C.1.pep
QNPVMSLSFWPDLIYCPLFMRHFFSLLKLGITHNNFHIAGVSHCFFFLPSTLEAVRSHIVYWLARYHTFHYL

SEQ ID NO: 281611 - protein, 45 aa, Glycine max
  Clone ID: PAT_MRT3847_96315C.1.pep
MHPSVSSQFGSHLNNNQLFYFLLSQHYNERRILYTFHLLIFIHEP

SEQ ID NO: 281612 - protein, 56 aa, Glycine max
  Clone ID: PAT_MRT3847_96316C.1.pep
SMAHSSPSLADKAVKLGPSALYVEWVIMMKTVTNQVSSGSPWHSPYRLNYLGTFYG

SEQ ID NO: 281613 - protein, 67 aa, Glycine max
  Clone ID: PAT_MRT3847_96317C.1.pep
LTLNRFQSDFWIYQCKCHKILSIPIGFKCIFYLKERSGHVLQVLHMFFREHNCLVKEQNPFKICCRD

SEQ ID NO: 281614 - protein, 124 aa, Glycine max
  Clone ID: PAT_MRT3847_96318C.1.pep
DAVLFFKEMKEVGVTPDVVTYNSLMDVYCKGREIEKAYKMLDEMRDQDFSPDVITYTCIIGGLGLIGQPDKARNVLKEMKEYGCYPDAAAYNAAIRNFCIAKRLGDAHGLVEEMVTKGLSPNAT

SEQ ID NO: 281615 - protein, 95 aa, Glycine max
  unsure (1)..(95): unsure at all Xaa locations
  Clone ID: PAT_MRT3847_96319C.1.pep
SSTKYQHKTSHTCSQISLSISIQATSTFFFSFGNKQRVSFNILLFIEIRYFPTYCFNRSQVFTFQHIRLAVQSAMNPKIQKTVRFYYTXSVRTRG

SEQ ID NO: 281616 - protein, 87 aa, Glycine max
  Clone ID: PAT_MRT3847_9631C.1.pep
PGPGFEFRDPYKKIMPPPPGELKLGFWQEPFQKFLWLSKNGWGEWDFPPKFSFNKLGRDINLFGTTGGVLCPFLGQPPFLKKGPFAL

SEQ ID NO: 281617 - protein, 109 aa, Glycine max
  unsure (1)..(109): unsure at all Xaa locations
  Clone ID: PAT_MRT3847_96320C.1.pep
MKMNALDFFDATLLVPWQCHAYYRFPLXMNTGYGARTQDVKCTRWKHAVDTYNIFDFENSREHCVEAIQEDIHGQXYRXHSSRVNLHAYIQARDLKVHHVDTFVFSING

SEQ ID NO: 281618 - protein, 234 aa, Glycine max
  unsure (1)..(234): unsure at all Xaa locations
  Clone ID: PAT_MRT3847_96321C.1.pep
EPNTLSVDFINLVEAEVARLEALKSSKMKELVLKKRTELEEICRKTHLIPEIDNAVESAVDAIESGSVDPACILEQIELQISQVKEEAFGRKEILEKVEKWLAACDEESWLEEYNRDDNRYNAGRGAHLTLKRAEKARALVNKIPAMVDGLTSKTIAWEKEKGIEFTYDGIRLLSMLEEYNILRQGKEQERRXRQRDLKKLQGQMIAEQEALYGSKPSPSSPXSVKKGPXMSLG

SEQ ID NO: 281619 - protein, 53 aa, Glycine max
  Clone ID: PAT_MRT3847_96322C.1.pep
FLLQGYHCPQLLIAKLYYSLRIHHVMVKHSQALTFSSYLITINLTVLSIYSFS

SEQ ID NO: 281620 - protein, 38 aa, Glycine max [sequence omitted]

SEQ ID NO: 281621 - protein, 63 aa, Glycine max
  unsure (1)..(63): unsure at all Xaa locations
  Clone ID: PAT_MRT3847_96324C.1.pep
FHNHTVLTXSAAHGXSTTVQDIXARQLKLGDNELLRTEKKFKVFMENYGRXXSTEEXYLXRXX

SEQ ID NO: 281622 - protein, 91 aa, Glycine max
  Clone ID: PAT_MRT3847_96325C.1.pep
GILLLWKITTLFDNGVECREALDAIIDRCSALQNIRQAVLQYRKVFNQQHVEPRVRTVALNRGAEYLERYFRLIAFAAYLGSEAFDGFCGQ

SEQ ID NO: 281623 - protein, 58 aa, Glycine max
  unsure (1)..(58): unsure at all Xaa locations
  Clone ID: PAT_MRT3847_96326C.1.pep
VVLXQERISRFLLXNKRLXXLHTASFCGACFFFSSFSXXTSILXSSFRFLRRFRHQHQ

SEQ ID NO: 281624 - protein, 74 aa, Glycine max
  Clone ID: PAT_MRT3847_96327C.1.pep
ILCSDPWCYLKRPYETHPVCFVAAYCQRWALMSLSCRLRGPLLSLARGLSGNPKTVRPCGVAFRGTLLTYLTRG

SEQ ID NO: 281625 - protein, 61 aa, Glycine max
  Clone ID: PAT_MRT3847_96328C.1.pep
RGYPRVSSHCTLLFGPQIVLKINMASEIFCANFSHHRSLSLVPSAPMQTVSFNPNPQQNHQ

SEQ ID NO: 281626 - protein, 73 aa, Glycine max
  Clone ID: PAT_MRT3847_96329C.1.pep
TGVKTSGEGWGVSQVPQCALLKLRFFHAIDGSCPRKTFLFLWIFVPPVQEVSLLGLVGLRPLKTSRSLFESFI

SEQ ID NO: 281627 - protein, 65 aa, Glycine max
  unsure (1)..(65): unsure at all Xaa locations
  Clone ID: PAT_MRT3847_9632C.1.pep
CYFYSALSPFLYSNSPHFISFXFSKNKXNVFFLSVKKEEEEKIGFEKMVNQSFLFLKNQGPNPCF

SEQ ID NO: 281628 - protein, 92 aa, Glycine max
  Clone ID: PAT_MRT3847_96330C.1.pep
AWASAGVGKELPLFSFGRSFGSNRVRLVLNLKGLNSNSRPVILLKGEHSRPEFFQLNPVGGVPVLVDDHVVFYDFFAIFLFLEDKFPNNPLF

SEQ ID NO: 281629 - protein, 59 aa, Glycine max
  Clone ID: PAT_MRT3847_96331C.1.pep
NLMQKSISFISSSSPTIVTKLTNNLFTSRFNSHKKHLGKYSQFCDREYRPLSPLKISGA

SEQ ID NO: 281630 - protein, 122 aa, Glycine max
  Clone ID: PAT_MRT3847_96332C.1.pep
MLNASDVIKHISEAFPSASPKCVEGADGTRSYIVAGIRPKPPPEVRSEGERKLDERWKCRWNGCGAGQPNFSSPRELHQHLEGHAQEGEGQDTNMEIETDDSKVCRFGGCAQQTGTAAALAL

SEQ ID NO: 281631 - protein, 302 aa, Glycine max
  Clone ID: PAT_MRT3847_96333C.1.pep
MQSQRTTPLRNPHTSTSDLLTWSEQPPPESSASGYRSRQPSDKIGEVLRGSQLTDEEAQSLTKKKPCSGYKLKEMTGSGIFSGKSEDTTSEENSANSKNRTSIRVYKQAMNGISQISFSTEGNISPKKPTSLPEIAKQRELGGTYQSKTVTKINKQTSSAKTKELSGSDIFAPPSEIVPRSLAAAHTLESKESKDTRRSVPQKVSTSAQVSNRADGQSNFSFSEQPVKILRKKMHDQKFAEMTGNNIFKGDVPAGSPEKPSSRAKLREMAGSDIFADGKAESRDHILGARRPPGGGSGIALV

SEQ ID NO: 281632 - protein, 102 aa, Glycine max
  Clone ID: PAT_MRT3847_96334C.1.pep
YGCEKTTEGEIVLEQNTIMKLRSILLIVWALFALLSHAYGEIRFCQKEMTLDGSCPLGTSGESCFLEFLNRLGASAMPMNCSCKDDPSHNKRQCTCNVVCNT

SEQ ID NO: 281633 - protein, 45 aa, Glycine max
  Clone ID: PAT_MRT3847_96335C.1.pep
PTIDVRERDAFPTNRAIAPLKPAEGAHILYTSNMTADEAVAQVLQ

SEQ ID NO: 281634 - protein, 73 aa, Glycine max
  Clone ID: PAT_MRT3847_96336C.1.pep
PLGGNPPPPRVKGPLQGGAPFPIKVGHWWERGTGGAPFLITPPGKRGIVSKPIKWGTPRGFPRPPVEKPGPGN

SEQ ID NO: 281635 - protein, 56 aa, Glycine max
  Clone ID: PAT_MRT3847_96337C.1.pep
FPFVSRVAVRSGFGLCRSWCPGPRVFFSAPPVVLSAFSVCKSIGRVGRPGFSGPVP

SEQ ID NO: 281636 - protein, 64 aa, Glycine max
  Clone ID: PAT_MRT3847_96338C.1.pep
VMVKEERFHIVSCKDSYALECRVGDNFPQIILNNVFSGAYMYIGSLFHGITTIDHENTPNFGSC

SEQ ID NO: 281637 - protein, 311 aa, Glycine max
  unsure (1)..(311): unsure at all Xaa locations
  Clone ID: PAT_MRT3847_96339C.1.pep
MAEKHNLKNPAVKRILQELKEMQSNPSDDYLSLPLEENIFEWQFAIRGPRDTEFEGGIYHGRIQLPSEYPFKPPSFMLLTPSGRFETQTKICLSISNHHPEHWQPSWSVRTALVALIAFMPTNPNGALGSLNYKKEDRRALAIKSREAPPKFGTPERQRLIDEIHEYMLSKSSPVPQLAPSQVSEXHSKTEEAEAEAQVNLHNPEALPAGVEIPDQAGDRVVEEQELPVNVNSNPAGVEASMDNSSSGSSNQLLQKSDARVQNLKPETRIQKSDDRLFTLAAIGLTIAIVVLLLKKFIKSTEYGAVFMDES

SEQ ID NO: 281638 - protein, 46 aa, Glycine max
  Clone ID: PAT_MRT3847_9633C.1.pep
LVYAIDLGLYRIIKMLPRSTYVARVHSYRLITVCSWMISLRDNSSR

SEQ ID NO: 281639 - protein, 89 aa, Glycine max
  unsure (1)..(89): unsure at all Xaa locations
  Clone ID: PAT_MRT3847_96340C.1.pep
FEEIMDEFIRQQLQMKAQWMEAFEARENERRLKEMEXRQTMEASENERLMMDQRWREREEQRRIREEVRADKRDALITALLNKLRREEM

SEQ ID NO: 281640 - protein, 32 aa, Glycine max
  Clone ID: PAT_MRT3847_96341C.1.pep
DRAFSVYLYVSLKMVSRRLVSYMIRWCVGRCE

SEQ ID NO: 281641 - protein, 98 aa, Glycine max
  unsure (1)..(98): unsure at all Xaa locations
  Clone ID: PAT_MRT3847_96342C.1.pep
MGDQVDLLDIWPSPFGMRVRIALAEKGIKYDYKEEDLRNKSPLLLQMNPDYMKSSGLMHNGXPIRESLVGVQYIEEVWNDTNPXLLPSCPYQRAHARF

SEQ ID NO: 281642 - protein, 45 aa, Glycine max
  Clone ID: PAT_MRT3847_96343C.1.pep
CILTTMKEFTNLHDSHTGQFVSCNELSMTLICTILALIDDINAIS

SEQ ID NO: 281643 - protein, 91 aa, Glycine max
  unsure (1)..(91): unsure at all Xaa locations
  Clone ID: PAT_MRT3847_96344C.1.pep
HSLNMNKTAGGTMLGIVKSCIGTKFTSQFGDLVAVSILYCMGKIFKFQICLLFSFIFILTXENSXXEXXTYLXXGNLMYITLPXXAAXXXX

SEQ ID NO: 281644 - protein, 142 aa, Glycine max
  Clone ID: PAT_MRT3847_96345C.1.pep
MRKSFKDSLKALEADIQFANTLASEYPSAGACFQMRLSYSPAAQFFLFLVKWTDCHLAGALGLLRILIYKAYEDGKTTISIYEKKASLKEFYGVVFPSLLQLHRGITDVDDRKQKHLCATKYKHKDLTSKGKLSEIDMEREL

SEQ ID NO: 281645 - protein, 112 aa, Glycine max
  unsure (1)..(112): unsure at all Xaa locations
  Clone ID: PAT_MRT3847_96346C.1.pep
MPAGHGXRSLTNNPFSRTSKKKGTIDLTTYLKTYHVGDDADLXDYVAVHKGMPDKFYHGRTGRVWNVTKRAVGVQVNMQVCNRIIWKRIHVRVEHCMPSRCTEELRLRKSMN

SEQ ID NO: 281646 - protein, 131 aa, Glycine max
  Clone ID: PAT_MRT3847_96347C.1.pep
MVPNQPARWTQSVSVQNLSTVAGTPFQGLTGEQRGNTAQSVSRPEELFSPQSEQNWTPTGRMRGSLDLSQLYDESIAQRIITPTQGQNSKPPGPQPVRRTGISSLQPATTQLDVLIANNRNANAHNRSSSR

SEQ ID NO: 281647 - protein, 410 aa, Glycine max
  Clone ID: PAT_MRT3847_96348C.1.pep
MKNVATQIDDFWPGVSFVRSTSDTPTVGNSELPVLPDTVSPTLSQQSAGHDNNPVVNSAMHNQFLGPNNLQMQMNHMNSVNEYGRSSSAPRHIHRTPVAVQALPVQSQALGPQQNSITNLNSSLLPSNSSAAPHISLSNPTSVDTLNAILSDTERQQHFSRTPMNLPQVSGVNSPAFQHHTATQNRGPLINTSVPTQPQNQYRANAFSEFRNSHLQQALNLRPPPPRSSNAQWSHIQQSVPQSGNFQAAARGASVAAGQGSSHARNVPTSGATTHSHQARGMVANQPARPSVLVQNQSTVAGTPFHGLTTEQRGNTAQSVSRPEELFSSQSEQNWAPTGRMRGSLDLSQLNDESIAQRIITPTQGQNSRPPGPQPIRRTGISSLQPATTQQDVLIANNRNANAHNRSSSR

SEQ ID NO: 281648 - protein, 95 aa, Glycine max
  Clone ID: PAT_MRT3847_96349C.1.pep
MAASLQAAATFMQPTKVGIASRNLKSTQCISKAFGLEPAAAKLTCSLQPDLKEFAQKCVDATKIAGFALATSALVVSVCLSFPFSLNLLNYSEII

SEQ ID NO: 281649 - protein, 91 aa, Glycine max
  unsure (1)..(91): unsure at all Xaa locations
  Clone ID: PAT_MRT3847_9634C.1.pep
TIRIRKTEQTQADTVVRRLGPSIYEPPQLNGLRLGVEENHHPGYLLRTXTRTHKGRTAQLILTISHTINQTQLLRWANRLYPDDVEAQRKK

SEQ ID NO: 281650 - protein, 99 aa, Glycine max
  Clone ID: PAT_MRT3847_96350C.1.pep
HLTCRDMERWMIVGQVASRLTHTHRHFERERWASMGGEDEMEMIKDLPQALRRDMKRHLRLYLIRKVTVFHILDDLILDNICDRVKPLAFSIDEKIIRE

SEQ ID NO: 281651 - protein, 286 aa, Glycine max
  unsure (1)..(286): unsure at all Xaa locations
  Clone ID: PAT_MRT3847_96351C.1.pep
MWSSKTTLMFGVAAIALMMFLSSASADDVVALTEETFENEVGKDRAALVEFYAPWCGHCKRLAPEYEQLGTTFKKTKSVLIAKVDCDEQKSVCSKYGVSGYPTIQWFPKGSLEPKKYEGARTAEALAAFVNIEAGTNVKIASVPSSVVVLSPDNFDEVVFDETKDVLVEFYAPWGGHCKALAPIYEKGQHLSWYKDVGKGVCVMPVRKIXEKKAVYSRLEKEVKKLKGSSARHGDLYLKLAKKGIEKGADYAKNEIQRLERMLEKSISPAKADEFTLKKNILSIFA

SEQ ID NO: 281652 - protein, 66 aa, Glycine max
  Clone ID: PAT_MRT3847_96352C.1.pep
SQESEGSESQREPRRHKSKNPLQFNSKRFQTVFKNQCGRVRVLERFNKRCQQLQNRRDYRIVEFNS

SEQ ID NO: 281653 - protein, 60 aa, Glycine max
  unsure (1)..(60): unsure at all Xaa locations
  Clone ID: PAT_MRT3847_96353C.1.pep
MIGRAGEVAAAVIVWEXGXXKSAETWNGRVXMLAVVVVLFFGFXADKGLVHQMGIWPSVR

SEQ ID NO: 281654 - protein, 325 aa, Glycine max
  Clone ID: PAT_MRT3847_96354C.1.pep
MEGVGARHNEISDGMQCMNHPHRNNNNNNPGGICALCLQDKLRNLLSSSFPTSSPPFSSSSSSSPSFTSSSSVKTDHDHDYDHYTRSRLPFLVPKKNIIINNKKPSSISTNIIFKRSKSTATPRRNNNQFLEEEDFSPRKRNGFWSFLYPSSSNGKHRDKCLGKKSDHVIVMEEDTCFSSSSKVSRSRSIGCGSRSFSGDFFDRISSGLSDCTLRRVESQREGGKPKVIANTMNHCMKERVRCGGIFSGFVMTSSSSTTSSSSSSSSSSWVSSSVDDGRGRSWGWAFASPMKAFTTKGSSKRDASDKNNDTHNLSAIPSLLTVRG

SEQ ID NO: 281655 - protein, 153 aa, Glycine max
  Clone ID: PAT_MRT3847_96355C.1.pep
MKLWDMRMESSPVAIFKIHEHLRPKLPELYNNDCIFDKFECCFSGDGLHFATGSYSNVVRIFSPGSERKEEIKLEIRGNSHRKVIHQAKSRVRRPSLSNLIPREIYQHAHTDSESSRADFSCNLSSKLLHVAWHPTCNLVVCAAESSLVLYYA

SEQ ID NO: 281656 - protein, 42 aa, Glycine max
  unsure (1)..(42): unsure at all Xaa locations
  Clone ID: PAT_MRT3847_96356C.1.pep
EFEVSGSFIISCDDRSQKSPRVRGRDGHGGSRXRNSLKPLLN

SEQ ID NO: 281657 - protein, 91 aa, Glycine max
  unsure (1)..(91): unsure at all Xaa locations
  Clone ID: PAT_MRT3847_96357C.1.pep
VRPXKHDPPIHRXXCSXXRRNXTMSVPLLXTNQFTSXMXXATPFRIXXIQLXIVPXXXPXNXXGIXRASPQADXXIATKSXXXXVTDIILT

SEQ ID NO: 281658 - protein, 86 aa, Glycine max
  Clone ID: PAT_MRT3847_96358C.1.pep
GPRPPAPRAPSLTHTPFHPHYHSSILLNPNSPAYLPHILHSRSFLVQSSRSHLPQSHCLFSFNPTVFLVNKPKVLTFNSALDCISE

SEQ ID NO: 281659 - protein, 159 aa, Glycine max
  Clone ID: PAT_MRT3847_96359C.1.pep
RQCVMTKEGFFFFFSLVPFCFRYLLDCSTRHSPSSRLRLRRPPTPSPRSPHAHSARSADCLVFTPYPPVIPAQVQLLRIELAALPTIRVMVHVPALAPWHGMRVVPAVVLIARCRVAALFVEAPPPACGHKAVRALELVREITPEMMNWDYNKSDPGGA

SEQ ID NO: 281660 - protein, 76 aa, Glycine max
  Clone ID: PAT_MRT3847_9635C.1.pep
GGSRVNYACVGSLTEAVASLEELTQEQQSTDWDEGAPLAERIPPAKKLRSAGIYFQPAKSGAISSIDFVEESCIFY

SEQ ID NO: 281661 - protein, 492 aa, Glycine max
  Clone ID: PAT_MRT3847_96360C.1.pep
LEPVQEKLNELLDGDGGISKRKDATKGYLKLLFLTVASGDRINGEAIQSNRDLSMILDALLKTKSRAVLNDIINKNGLQMLHNIMKQYRHDFKKIPILRKLLKVLEFLEASKILTSEHINGGPPCHGMESFRESMLSLTEHEDKQVHQIARNFRDRWFPRHARKHGYMDRDDNRVESHRSFKCNRFSASHSQRHEQDLRTTEAIDCSQQAMLVTTPVDAETWEGCPVQSLDGVEIKRAKKRKRKSRWDQPADTNSHSDAVMSSIGESQNIPEDGPPGFSCPVGSLNASLNSGNLALQNASRSGCPSDIVIGHPKEKFNSHLPVSYGMPWSAQQYGTPHAEFPECWVTAPGMPFNPFPPLPPYPRDNKDCQPSNTTNAMIIDQPAEVKQGDTSGMVNCCSDDMIPSTTGVNSEDSNLLFEDDKHISKRLKGDSNDLGTRYFRQQKIHRPWFKRNAWKCDENNSCGDMCSIDVGDVPKESKVTCDAEDAICREE

SEQ ID NO: 281662 - protein, 71 aa, Glycine max
  Clone ID: PAT_MRT3847_96361C.1.pep
NEMTKLNIRSALGICMQISEKRFGGGAMLRELVMAASKATYLEAYEEKMNQIREINNQAYEWLATELLKKT

SEQ ID NO: 281663 - protein, 45 aa, Glycine max
  Clone ID: PAT_MRT3847_96362C.1.pep
ARVKVERVQKYFYSQSNNFFLHLCIGIHKHTFQTLIQHSRSLSKV

SEQ ID NO: 281664 - protein, 126 aa, Glycine max
  unsure (1)..(126): unsure at all Xaa locations
  Clone ID: PAT_MRT3847_96363C.1.pep
RCLSSSHFQVAERALFLWNNDHIENLIKQNCXIILPIVLPALEKNARNHWNQAVQSLTINVRKIFADTDPELLEECLRKFKEDEAQEKALKLKREATWKRLEEIAAMKAASNEPVLVSPRTASSSG

SEQ ID NO: 281665 - protein, 162 aa, Glycine max
  Clone ID: PAT_MRT3847_96364C.1.pep
GDSTSDRSSSSSCSDSLSFRFVFSYSKLTHQSLPHQQYPLRAPNPFSHSSFSPPSTGNVNMSICFSTSQSSINAVVLKGRTPLLMSSNIHGLWSQGISTSISSSLSPGKSEISHVGLSVCTKLSCSTVMGQTIRGGDRDKRKKRKIRNHIKHLQLTLYRREK

SEQ ID NO: 281666 - protein, 100 aa, Glycine max
  Clone ID: PAT_MRT3847_96365C.1.pep
PARAYLAKQYTELINQGLNDIKTQTSVVSFLLLGSRLIFIVPLLWFEEWIILDEDNVGGGDGDDYAAEDGDRAGKETPLPIDHLLLLALILSLSGSSFHK

SEQ ID NO: 281667 - protein, 80 aa, Glycine max
  Clone ID: PAT_MRT3847_96366C.1.pep
LFFDIFFFNLRGCLKSLWFFPPFVLNILSRGKKFLEKKKLGLKGFLTMSGHLLVKRDFPGIFGPGVYLKFFLKKGSGPPF

SEQ ID NO: 281668 - protein, 139 aa, Glycine max
  Clone ID: PAT_MRT3847_96367C.1.pep
GSNYIMAGSRYRNDGFGFAFPLNSNLTTHFSRAILKVTESELMNEIERKYFGKKDIEEDSSAEISSAAPSLNFHSFAGLFLITGISTLLALMVSETVIWRRVILMAKAISQRYLFATPPPTETRVHPIHDDSIRGIEAI

SEQ ID NO: 281669 - protein, 117 aa, Glycine max
  unsure (1)..(117): unsure at all Xaa locations
  Clone ID: PAT_MRT3847_96368C.1.pep
ARARHGLLCVLPIFHISALNIVVIYRMECGXTALLILQKPEITTLLELIDNFNVTGAXEIPPISCALIDSEEDPTLPPMXLRAVVTVAAPLGGELXEADNAMLPHSTFGQVSEMTEA

SEQ ID NO: 281670 - protein, 24 aa, Glycine max
  Clone ID: PAT_MRT3847_96369C.1.pep
PSCLEFHQDQDFKLQLESQFSHNN

SEQ ID NO: 281671 - protein, 54 aa, Glycine max
  Clone ID: PAT_MRT3847_9636C.1.pep
HVNQIFIPFWIYGFISHNMRKNMTIQESLRQTSLYPKASKPYLKKNNKKSNKKS

SEQ ID NO: 281672 - protein, 38 aa, Glycine max
  unsure (1)..(38): unsure at all Xaa locations
  Clone ID: PAT_MRT3847_96370C.1.pep
SNIYXYINILYLLSNITITYLHLLDVIYTYLNLNLLIS

SEQ ID NO: 281673 - protein, 58 aa, Glycine max
  Clone ID: PAT_MRT3847_96371C.1.pep
SSRLKKCGQFLSEPQYLQVLGTPERSDLSVLILRCQPPFHLVGQLTTDAFSLTQSRSC

SEQ ID NO: 281674 - protein, 93 aa, Glycine max
  Clone ID: PAT_MRT3847_96372C.1.pep
HFPQVKHFCKVFQKECRFPEYQFSWVRNTARLVVWSEYFLSQLTEIEHIENSGNEVAITQGSAVCMVGLGLSFILRILCPCRYSFYTWYCMCY

SEQ ID NO: 281675 - protein, 263 aa, Glycine max
  Clone ID: PAT_MRT3847_96373C.1.pep
MASTSSALTISSSSTLHDCKAPRQSPAASPQCVSLPSPLLHSQNCSWKTTAYCRSIARNVMAMATGEAPAEAAPTEVLSLGASESLTEQVAGMASTLSISSSSTLVDAKPPTPRQCVTLPTLPPPPFHSQTRPWKTTAFCRRLARNFMAMATTREAAAAEVAATTDLSIAETPEIVKTIQEAWDKVEDKYAVSSLAVAGVVALVGSAGMISAIDRLPLIPGLLEVVGIGYTGWFAYKNFVFKPDREAFLRKVKETYSEILGSS

SEQ ID NO: 281676 - protein, 116 aa, Glycine max
  unsure (1)..(116): unsure at all Xaa locations
  Clone ID: PAT_MRT3847_96374C.1.pep
LNFIIHYGLILSGRRIASNVMAMATTREAPAAEVATTELSVAETPEIVKTIQEAWDKVEDKYAVSSLAVAGVVALVGSAGMISAIDRLPLIPGVLEVVXIGYSGWFAYKNPIFKPD

SEQ ID NO: 281677 - protein, 169 aa, Glycine max
  Clone ID: PAT_MRT3847_96375C.1.pep
MASTSSSTLSISSSSTLVDAKAPSPRQSPQCVSPPPVHSPWKTTAFCRRIASNVMAMATTREAPAAEVATTELSVAETPEIVKTIQEAWDKVEDKYAVSSLAVAGVVALVGSAGMISAIDRLPLIPGVLEVVGIGYSGWFAYKNLFFKPDREAFLRKVKETYSEILGSS

SEQ ID NO: 281678 - protein, 78 aa, Glycine max
  Clone ID: PAT_MRT3847_96376C.1.pep
MVVMCAHNTVQGITCGHGHGNLTPCLGLLHNGGAVTIRCCNRLRSIGSNARTTDDHRRVCHRLMLAADAVRRSNTYNG

SEQ ID NO: 281679 - protein, 54 aa, Glycine max
  unsure (1)..(54): unsure at all Xaa locations
  Clone ID: PAT_MRT3847_96377C.1.pep
YTGDIIVVNGTKQRIFESKSVLTYSHLGEFKQYTXRXXXXXXSGALIWIQKTCK

SEQ ID NO: 281680 - protein, 108 aa, Glycine max
  Clone ID: PAT_MRT3847_96378C.1.pep
EKISERMKILQDLVPGCNKVIGKALVLDEIINYIQSLQRQVEFLSMKLEAVNSRLNSGIEAFPPKDFGQQAFDPAGIPFGSQAPREYSRGSSPDWLHMQIGGSFERTT

SEQ ID NO: 281681 - protein, 128 aa, Glycine max
  Clone ID: PAT_MRT3847_96379C.1.pep
PFTFVGFLLWAPLLSAFGLPLYFFGGIGFRFPFRPVSRLCLFLARSLFWPPLVYLVCLPVAFCVFLCGPSVLAQYLGFSPWYAQLFFASISEWWFARRFRFPFPGAPPESIQMSIYKTIHINKNHTGN

SEQ ID NO: 281682 - protein, 40 aa, Glycine max
  Clone ID: PAT_MRT3847_9637C.1.pep
CDPTCDSISGNFTAFFESRKLLFEFYDSTLSAVMEKNPPP

SEQ ID NO: 281683 - protein, 27 aa, Glycine max
  Clone ID: PAT_MRT3847_96380C.1.pep
SCLQCTYRSLVNSIHILRNKSKMAWFN

SEQ ID NO: 281684 - protein, 58 aa, Glycine max
  Clone ID: PAT_MRT3847_96381C.1.pep
TQTQCSIHTSYWSFTRGTGYKPFEHNLILVPTYFDQMQNMLLLLEFHHLRNTAPPIAL

SEQ ID NO: 281685 - protein, 149 aa, Glycine max
  unsure (1)..(149): unsure at all Xaa locations
  Clone ID: PAT_MRT3847_96382C.1.pep
RAEQSLCQVGQPXXXVCFFFSFLXSLFILFFILFFKQVHPFSFLEKDHFFFFFFSRGWNPTPPTKKKKKKYPPLFKGKRNKIFYFYVSGWLGSDQKKNKFTNFFFSVSGIGKGALGTSNLSFWPSQIYIGEKERDRFQARPYSTFSVLP

SEQ ID NO: 281686 - protein, 61 aa, Glycine max
  Clone ID: PAT_MRT3847_96383C.1.pep
NGPRNCLGKNLAYAEMRCILAKVIFHFDLELIDQKKNWFDQRVFTLWEKGPLLIKIKEARR

SEQ ID NO: 281687 - protein, 130 aa, Glycine max
  Clone ID: PAT_MRT3847_96384C.1.pep
MHSYHISVSIHYYSFPQLVKSKSVEVHMETKKRIVSFQLQAQALLLVMMMVASPIMSCPPTDGRGCKDCIVNQMKNACPPCTPILHCMARCLWDGSSRPNCIKKCDCNTTYPTLSDCKGCMSKCKCSCVN

SEQ ID NO: 281688 - protein, 46 aa, Glycine max
  Clone ID: PAT_MRT3847_96385C.1.pep
HDPLADLINDQWHKATPSYLGFTECSLLIGHSANNQEPMNPNNLVF

SEQ ID NO: 281689 - protein, 162 aa, Glycine max
  unsure (1)..(162): unsure at all Xaa locations
  Clone ID: PAT_MRT3847_96386C.1.pep
MRFELVGASIMHYATKWLPGGTSDTATPGDEASNCSMSNSSSSGGGSWKSGLHMVVTGTKXHTSSLQAKEQRMIIESLVSIIPPQKDSVSCSFLLRLLRMAIMLKVAPALVTELEKRVGMQFEQATLADLLIPSYNKGETMYDVDLVQRLLEHFIIQEHTES

SEQ ID NO: 281690 - protein, 75 aa, Glycine max
  Clone ID: PAT_MRT3847_96387C.1.pep
AIEPYGKGGIYSHNSSNYEFNTGSCNSDETRRQSKVLIISMCLSFFNINYVHITNLFSFYIASAPAIFSVAAVCS

SEQ ID NO: 281691 - protein, 727 aa, Glycine max
  unsure (1)..(727): unsure at all Xaa locations
  Clone ID: PAT_MRT3847_96388C.1.pep
MAHVLLRRPPLLRVIMASRFITSSSFHMRLSSFPSSTLSKTRTSFPLRKFLAPCCSVPNAFTPRAFMSSISATEAFLKSESSTAYSSDQIQVLEGLDPVRKRPGMYIGSTGPRGLHHLVYEILDNSVDEAQAGFASKIYVVLHADDSVSITDNGRGIPTDLHPVTNKSXSLETVLTVLHAGGKFATRPSGYSVSGGLHGVGLSVVNALSESLEITVWRDGMEYMQTYSRGKPVSILKCLVLPDERKDLRGTRVRFWPDKEVFTTAIQFDHNTIAGRIRELAFLNPKLTITLRKEDNDPEKVQYNEYFYAGGLVEYVKWLNTDKKALHDVLSFRKETDGITVDIAFQWCEDAYSDTILGYANSIRTIDGGTHIDAMKASITRTLNSLGKKSKVIKEKDITLSGEHVREGLTCVVSVKVPNPEFEGQTKTRLGNPEVRKVVDQSIQEYLTEYLELHPDVLDSVLSKALNAFKAALAAKRARELVRQKSVLRSSSLPGKLADCSSTDPEECEIFIVEGDSAGGSAKQGRDRRFQAILPLRGKILNIERRDEAAMYKNEEIQNLILGLGLGVKGEDFKKDALRYHKIIILTDADVDGAHIRTLLLTFFFRYQRALFDEGCIYVGVPPLYKVVRGKQVHYCYDDADLKKLQRSFPANASYNMQRFKGLGEMMPLQLWETTMDPERRLLKQLKVEDAAEANIVFSSLMGTRVDVRKELIRNSASLIDLHQLDI

SEQ ID NO: 281692 - protein, 142 aa, Glycine max
  Clone ID: PAT_MRT3847_96389C.1.pep
CTVDEFNESIDCIKLVSEELADWVSASRPERWSDAFFKGLRHGHYSSNAAAMFKEWLPLKRIEPSVVQMVDIVRCKMMEMIFIRRESSRTWTEILTPSTSCKLQEEINKSHGLDVVCSTDSVFDVRDESLHVVNIENWECIC

SEQ ID NO: 281693 - protein, 63 aa, Glycine max
  Clone ID: PAT_MRT3847_9638C.1.pep
RIPNFLSRAPTWMTDKDLSSTVFDGNDAYTRLIISTTIAGKNGEPIQTITYIVKLVVWHMDHL

SEQ ID NO: 281694 - protein, 118 aa, Glycine max
  unsure (1)..(118): unsure at all Xaa locations
  Clone ID: PAT_MRT3847_96390C.1.pep
LESVGYDLVVLGGLDPNSREACNSVFVYXILMEKWRRWAYMPDGPSTFLARAXISKKQHIDAGGHDNXKNALRSALDYDXTWDLRYMLPDMEAXRDEGKGFLCSERFVSVGGYPTETH

SEQ ID NO: 281695 - protein, 34 aa, Glycine max
  Clone ID: PAT_MRT3847_96391C.1.pep
MVERVKGQGIKMNNNLLEGIAAVIKTTADSFVSQ

SEQ ID NO: 281696 - protein, 48 aa, Glycine max
  Clone ID: PAT_MRT3847_96392C.1.pep
MSFKVTLLIFLTKTRQNAITYSAASVFISKQTGLEFMTREQRKSGNWF

SEQ ID NO: 281697 - protein, 90 aa, Glycine max
  unsure (1)..(90): unsure at all Xaa locations
  Clone ID: PAT_MRT3847_96393C.1.pep
SLTXGQKXARGCFWSRTGHFPKAHYIVLTIWLLTRTSCEPRKPRTRRTSLEEKLLIRLRSLNKPTGTPGSITANLGSNGNPMVRPGSRTG

SEQ ID NO: 281698 - protein, 288 aa, Glycine max
  unsure (1)..(288): unsure at all Xaa locations
  Clone ID: PAT_MRT3847_96394C.1.pep
MMPITCESSIVSPLLLSRVCQAKTDPTRALLLGNKFSTMAVTALPKTCCIQCTIVRSKFSHKSGGPMEKKGKKTTGKKEHHLWKSRDSAQSGQKALALVRTVYKLPNEKEAVYGXLDKWTGLETEFPVIAVSKALKILRKRGHWVRVIQVAKWMLSKGQGATMGTYDTLLLAFDMDKRVDEAESLWNMIIHAHMRSVSKRLFSRMISLYDHHNMPDKIIDVFADMEELRLKPDEDTVRRVARAFRELGDEEKRKLVIKQYGLKWKYIHFNGERVRVRTEAWEDNKSTN

SEQ ID NO: 281699 - protein, 133 aa, Glycine max
  unsure (1)..(133): unsure at all Xaa locations
  Clone ID: PAT_MRT3847_96395C.1.pep
MPITCESSIGSPLLLSRVCQAKTDPTRALLLGNKFSTMAVTALPKTSCIQCTIVRSKFSHKSGGPMEKKGKKTTGKKEHHLWKSRDSAQSGQKALALVRTIMEVQMNKEAVYXALDKWTAWETEIPVIAVSKA

SEQ ID NO: 281700 - protein, 135 aa, Glycine max
  unsure (1)..(135): unsure at all Xaa locations
  Clone ID: PAT_MRT3847_96396C.1.pep
MNDLFYLECRKGKKTTGKKEHHLWKSRDSAQSGQKALALVRTLVISGLXKLPNEKEAVYGALDKWTAWETEFPVIAVSKALKILRKRGHWVRVIQVAKWMLSKGQGATMGTYDTLLLAFDMDKRVDEAESLWNMI

SEQ ID NO: 281701 - protein, 65 aa, Glycine max
  unsure (1)..(65): unsure at all Xaa locations
  Clone ID: PAT_MRT3847_96397C.1.pep
XXXXXVXSXXXSSSXXPXLAXNCAXMRXVXLXRITRVXSXSXPXXGXXXXXLXEQXXXXSARVXF

SEQ ID NO: 281702 - protein, 154 aa, Glycine max
  unsure (1)..(154): unsure at all Xaa locations
  Clone ID: PAT_MRT3847_96398C.1.pep
MSHSQRMRKRHNSDKYADKEESQAPTSSKSDSDHTSFLCSQKRVFALCLAFRMVNSVLVQTYFNPDEHWQGXEIAHRIAFGYGHLTWEWKQGIRSYLHPIXFVPLYRLLALLHLDTPWLMMRAPRLLQSVFSAVGDLLLVQACWRFSLVNSVAK

SEQ ID NO: 281703 - protein, 77 aa, Glycine max
  Clone ID: PAT_MRT3847_96399C.1.pep
KEGEIYNMGVQGSFGLVKKYWLGKPTREILIGVLKTQKGGQKPGLDAILPFSIPFYFLLATFTGCLFLFLTPNFATF

SEQ ID NO: 281704 - protein, 167 aa, Glycine max
  Clone ID: PAT_MRT3847_9639C.1.pep
GSPFHCRLLPGPKDMGVRYLELSTPTGPLQTPNHLPHSHSRLGTRPIMLTLPLLPRGIIRALDMLVHRRRLQPLAPILLKRLHARVELGLLQGKVVDGADARDAHAGVAAAAAVHEGAADAAEAVFHVVARGDGVVLAEARELVFATGVLEGFVLDDEVGGEHACRD

SEQ ID NO: 281705 - protein, 57 aa, Glycine max
  unsure (1)..(57): unsure at all Xaa locations
  Clone ID: PAT_MRT3847_963C.1.pep
EQTHQXXPKQPKGXHSTKKTGKGKRPGKGGNRKRKAKGPGTKTPREAXEGTXXDKKR

SEQ ID NO: 281706 - protein, 129 aa, Glycine max
  Clone ID: PAT_MRT3847_96400C.1.pep
MMHHPTDFLLQPNFTRGVSASLNLVLLLMLVVYWVWKKVQVDNSEKSERKGFHNTAFLYYKHSLVCSLVICVFNLLLCLLSYFYLYNNYGSEELVTASDLALKTVVWGSVCVFLYSTNSEAQDPSFPRL

SEQ ID NO: 281707 - protein, 173 aa, Glycine max
  Clone ID: PAT_MRT3847_96401C.1.pep
MTSCTSFASFLISSSSFPSLCFAQTHSITCKQRFPFPSVKGRRKFSTLSFSSTKRLVTRAAEYKFPDPIPEFADAETQKFKSHLLKKLSKKDMYGESIEEVVGICTEIFSTFLHSEYGGPGTLLVLPFVDMADALNEQGLPGGPQAARAAIKWAQDHVDKDWKEWTNGDTNKK

SEQ ID NO: 281708 - protein, 116 aa, Glycine max
  Clone ID: PAT_MRT3847_96402C.1.pep
DTPSSNRSGTCDHAICQDLGIKGPIDRPAVHMAFHIYYDHYHDHKLDVYTPDHTRFHDCFNDSMVDVYIDISHHRYDHRWVHRLVPLSVPIDFAPDSLIEPYSYPTAYGPYQVKLL

SEQ ID NO: 281709 - protein, 60 aa, Glycine max
  unsure (1)..(60): unsure at all Xaa locations
  Clone ID: PAT_MRT3847_96403C.1.pep
YXSSEFGLERFYPIEILXMTGXKLKXSQXLELNKXXNLIGLVEWYQKNGVLTPISYLLLN

SEQ ID NO: 281710 - protein, 46 aa, Glycine max
  Clone ID: PAT_MRT3847_96404C.1.pep
KKHTKTKKKKKKKKQKIKKKRKLKKPQSHLNTSNILSPKFNYLTFL

SEQ ID NO: 281711 - protein, 247 aa, Glycine max
  unsure (1)..(247): unsure at all Xaa locations
  Clone ID: PAT_MRT3847_96405C.1.pep
MRINPTTSGPEVSALEKKNLGRIAQIIGPVLDVAFPPGKMPNIYNALIVKGRDTVGQQINVTCEVQQLLGNNRIRAVAMSATEGLMRGMEVIDTGAALSVPVGGATLGRIFNVLGEPIDNLGPVDTRTTSPIHRSAPAFIQLDTKLAIFETGIKVVDLLAPYRRGGKIGLFGGAGVGKTVLIMELINNIAKAHGGVSLSYGGVSVFGGVXERTREGNDLYMEMKESGSINEPNIAKSKVALVYGSNE

SEQ ID NO: 281712 - protein, 63 aa, Glycine max
  Clone ID: PAT_MRT3847_96406C.1.pep
TVRFKFPLYVYIYSLFLFFAYLCSSTIYQSLGMAIVTPPTFGYHGYFIYFSPRLNLASPSTVL

SEQ ID NO: 281713 - protein, 69 aa, Glycine max
  Clone ID: PAT_MRT3847_96407C.1.pep
YNSELRIFILTDFLQFFRRFPQINIGGNFAHLSSFGKRTREPRLGRQEKGMLRQLATPLGTFFRELDLF

SEQ ID NO: 281714 - protein, 99 aa, Glycine max
  unsure (1)..(99): unsure at all Xaa locations
  Clone ID: PAT_MRT3847_96408C.1.pep
XXXXLLYXYXXXXXXPXXXXTAXPDTXPXXXXXXXXXILXXAXYXXXXXXLXFLXSAHAXXFXVXXXCXXXXXXXXXXXXXXTXXXXXSXDXXXTYXAX

SEQ ID NO: 281715 - protein, 88 aa, Glycine max
  unsure (1)..(88): unsure at all Xaa locations
  Clone ID: PAT_MRT3847_96409C.1.pep
PVNPTPRPTLAPGPKPQSQVTVDLVTLKDDSGTAYDQGNEVGIALFAGAPSXNAIGIWKAFPSNGQPXATSAWQTPAAESAKADWELA

SEQ ID NO: 281716 - protein, 71 aa, Glycine max
  Clone ID: PAT_MRT3847_9640C.1.pep
CIVQRLPTTDFVMSLTSLAIMGILHAILHTMGIMAAPWIYILDLSHMSTVFVGYSHRDTCPYPITTIVTGL

SEQ ID NO: 281717 - protein, 106 aa, Glycine max
  Clone ID: PAT_MRT3847_96410C.1.pep
NMLIVELEKSVPTLVGIECPKDEKLARRKILDKPKTRCFTILLMGLNLVARQKFLNFVRSLLRKGARLSGQVGINPYSMEWTVLANTLLVRGTDILCGDYASSDGL

SEQ ID NO: 281718 - protein, 140 aa, Glycine max
  unsure (1)..(140): unsure at all Xaa locations
  Clone ID: PAT_MRT3847_96411C.1.pep
PGIDQRKQPPPRSIDQAAGXILPFKVKGEDLLREGXIPYAIGGPCAXHEEPPGSNVKFDQGINIGGLISRAELALMGEAGLESPKGGDRTFKVKGVLPFREPVSVDPTTPPPEREYFAYIKNLKKGIAGKEALQQNPVWV

SEQ ID NO: 281719 - protein, 63 aa, Glycine max
  Clone ID: PAT_MRT3847_96412C.1.pep
IFGSLNLMIQDYPKLKPVKKKIMGENMIQFQYNELSSVFYSSSGHDNNTGHVSLISMMIVLVS

SEQ ID NO: 281720 - protein, 58 aa, Glycine max
  unsure (1)..(58): unsure at all Xaa locations
  Clone ID: PAT_MRT3847_96413C.1.pep
GIRWVVWIFVVFGLNVDXXVAKTMLPXGPXVGXGEHCREHSWCVCXFWFLFYWXXRGC

SEQ ID NO: 281721 - protein, 62 aa, Glycine max
  Clone ID: PAT_MRT3847_96414C.1.pep
WYFKLVTNSTRFHRLSFMFSMMTTLLKSPPTLYWYKVLSNLEPTYQINNPNKPLHKPLKLSF

SEQ ID NO: 281722 - protein, 63 aa, Glycine max
  Clone ID: PAT_MRT3847_96415C.1.pep
FFNWFFTSGGQTKRGSHRELFLDPDVLIPPGFFYVSSHLFGRGLSFRLKQGFFNFFSLMQTAY

SEQ ID NO: 281723 - protein, 58 aa, Glycine max
  Clone ID: PAT_MRT3847_96416C.1.pep
GCCLESDPRGRAMFDINTICFHDCAFWKDVRPKARALLCYHSARTDAWSLEVEKLSGK

SEQ ID NO: 281724 - protein, 130 aa, Glycine max
  unsure (1)..(130): unsure at all Xaa locations
  Clone ID: PAT_MRT3847_96417C.1.pep
XLTXXXXPKPFXXXKTLLXNGXLXXLXXXXPXXPXLXXRXFLXXLLCQPLXYXXXXIXLYPXNKTSNXRXPXEXRXYXLYXSXPXXTYXXMFXSXXXHXKAYXXXXTXXESXXLSNXLXCAXXRRXTLLX

SEQ ID NO: 281725 - protein, 145 aa, Glycine max
  unsure (1)..(145): unsure at all Xaa locations
  Clone ID: PAT_MRT3847_96418C.1.pep
MSDIIWNEYIWLPPNMTWADLESREGLNYPQFRELSYAFLAACIITVVRICTEAFVFVPIGFYGGWMDEKKGSIYYRIWDHLFFGFAGRSKFKRVAETGWRFTYYSIIWFVGVSVLYKEXQFSSVIECFREWPKHHLPNDVWQYY

SEQ ID NO: 281726 - protein, 141 aa, Glycine max
  Clone ID: PAT_MRT3847_96419C.1.pep
QKIQLKIPPDLSLKWQGGEGVSPPGGGFFPPPTFRFFFPTRGWPPALNKDFPQVFCKKNTPSLLQKNASFFSCKKFFFFGSHQGFFFSRPFYAGRSRPSLGSSAAPFPGKEAPPFFFKKIRPFFFPLRRGFFFPEGGVFYS

SEQ ID NO: 281727 - protein, 96 aa, Glycine max
  Clone ID: PAT_MRT3847_9641C.1.pep
LLIFASPVLNYNKDGSASLNLSLEENLDPAFCRYTANIYTISNIPPLYMAQNQAYKRRFYDVLSLELYTIKYLEEDCYCNICIAKGLCMSTPATIG

SEQ ID NO: 281728 - protein, 73 aa, Glycine max
  Clone ID: PAT_MRT3847_96420C.1.pep
HQVASTKIHLRASTNGSPPLRLSLEILINIVHNKQAVQPIGIAARGSSSAPSQIQQHKNNQPSASIKRIAGMN

SEQ ID NO: 281729 - protein, 61 aa, Glycine max
  unsure (1)..(61): unsure at all Xaa locations
  Clone ID: PAT_MRT3847_96421C.1.pep
SCMLSXLTRTHPRKSIGPIGLRKPMGRCVIHHDEQIIRCVFNLVWTSXGMLTSEAPVSDLG

SEQ ID NO: 281730 - protein, 90 aa, Glycine max
  Clone ID: PAT_MRT3847_96422C.1.pep
EQTYLSCKYIYLQAFISAMDKLKDGAQVTDKDIKDLTFVVRQTKKEESSCSSPKYSIFHFFSSLYLPLCILLYEYFPRFEAALFLELDDY

SEQ ID NO: 281731 - protein, 426 aa, Glycine max
  unsure (1)..(426): unsure at all Xaa locations
  Clone ID: PAT_MRT3847_96423C.1.pep
MFTLATSSQVLLRLQPPHSMEPMAHSLTLTPFPATASSFRHRHLYAVKALTLRSVTRRLKPALVRACDRSQQMGGNGSKETKGLSWVEPILTFARRNILPLALVSAVTLGLTYPSIGCVADKYGVSKIGPFGIFVISGLMLRSEEIGAAVEAWPVGLFGLVSILFLTPXFSRVILQIQLQPXEFITGLAIFACMPTTLSSGVELTQLAGGNSALAPTRPVISNMLGILIIPLSITKFVAAGVGVTLPTKQLFKSLVLTILIPLILGKVLRESFKGVADFVDKNRKLFTVISALFLSLVPWTQVSRSRSLLLMVKPSVFLVAIGLGTLLHLSLLVFNILAVWGLSVISGGKNSIFSREQNASALVLVASQKTLPVMVAVIEPLRGAFGESGLLVLPCVAAHLNQIILDTFIVNFLRPQDNSNNVKVA

SEQ ID NO: 281732 - protein, 33 aa, Glycine max
  Clone ID: PAT_MRT3847_96424C.1.pep
DTHTQKKTELINTDTLEHAQQQRTTKYNYTHIT

SEQ ID NO: 281733 - protein, 101 aa, Glycine max
  unsure (1)..(101): unsure at all Xaa locations
  Clone ID: PAT_MRT3847_96425C.1.pep
PERPPTNRHPAHSPSEQRSPPLLSPPRTPSSPSRSFTPNPPTPPNPSSPTSASPQRPPRPPRLHAPPQVXPLSRLWPXPRQDPPQTRPPRPPPIRLRLPQP

SEQ ID NO: 281734 - protein, 110 aa, Glycine max
  unsure (1)..(110): unsure at all Xaa locations
  Clone ID: PAT_MRT3847_96426C.1.pep
QEWEVKLEYSALALGIVGYICLALLFFPVTRGSSILRFIGLTSEGSIKYHIWLGHIAMTLXTAHGLGYIIFWGKTHQILEIFKWNKIGVSNVAGAVSLLAGIKPWAGTLT

SEQ ID NO: 281735 - protein, 69 aa, Glycine max
  Clone ID: PAT_MRT3847_96427C.1.pep
LFINSYIFSSSFSSSSLYDFWIAQKGFQVPQPIKIKLHGLMLLASLPDPVDDAGGDHGEGKAARGGSDE

SEQ ID NO: 281736 - protein, 96 aa, Glycine max
  Clone ID: PAT_MRT3847_96428C.1.pep
ATSLLNRIKSTQSLDMALSRLRHPLFSRSLLILSSPARSLSRTSYSSIFTLGGDHHNITRPASCSRLTGIHDRSLKSKWTDVKYFSSSDSSHEVLG

SEQ ID NO: 281737 - protein, 93 aa, Glycine max
  Clone ID: PAT_MRT3847_96429C.1.pep
HNNNNNNYKCLADQFTPSLQKESGISRDQNYRGEGEGADAIIMSSDTPETGPGAAPELTSSTMARRGLVLCFSHSSGKNTPASHQSMLSYYLC

SEQ ID NO: 281738 - protein, 93 aa, Glycine max
  unsure (1)..(93): unsure at all Xaa locations
  Clone ID: PAT_MRT3847_9642C.1.pep
FSINNPGDPFIESNYGVHSRQFEVGVLDXFAWLWELEKDEYWGYITNCGTQGNLHGILVRREVLPNGIIYASHESHXSCFKAARMYILDCVKI

SEQ ID NO: 281739 - protein, 79 aa, Glycine max
  unsure (1)..(79): unsure at all Xaa locations
  Clone ID: PAT_MRT3847_96430C.1.pep
NPSHLGGKALGPIIRGQKVGKSQKAPLGGLFNSHLPTQQKGLGFENKKTTGIFQKIFSRVFVSFXKKKEHLKPIKIQNK

SEQ ID NO: 281740 - protein, 127 aa, Glycine max
  Clone ID: PAT_MRT3847_96431C.1.pep
SHSFFSGSLNLYLHPNHHHLTSAPPRISMRVASKQAYICRDCGYIYKDRTPFEKLPDNYFCPVCGAPKRRFRAYAPAVTKNDNDTAVRKARKAELQRDEAIGKAFPIAIVVGIAVLAGLYFYLNSQY

SEQ ID NO: 281741 - protein, 227 aa, Glycine max
  unsure (1)..(227): unsure at all Xaa locations
  Clone ID: PAT_MRT3847_96432C.1.pep
RVRTKERYWGPVDVYVGGAEHAVLHLLYARFWHKVLFDIGVVSTKEPFQCVINQGIILGEVQYMTCRDQVGNLISADSTDMLNEHKLEIIPAEKVMKSGDSFVLKEHPDIRLFARAHKMSKSRGNVVNPDDVVSEYGADSLRLYEMFMGPLRDSKTWSTSGIEGVHRFLGRTWRLIVGSPLSDGTFKDRTVSVDEEPTIEQLXRCLHKCIAKYSGNRRKLRAPRLNT

SEQ ID NO: 281742 - protein, 631 aa, Glycine max
  unsure (1)..(631): unsure at all Xaa locations
  Clone ID: PAT_MRT3847_96433C.1.pep
YLVVAPEHTLLSSLVSIAQSKHVEDYVDLASRKSDLERTELQKEKTGVFTGCYAKNPANGEAIPIWVADYVLGSYGTGAIMAVPAHDSRDYEFALKYDVPICWVVMPDDKSIESGKAFSGEGTIVNSSNTLVGLDINGLSSNEAALKVIEWAEKSGNGKRKVNYKLRDWLFARQRYWGEPIPVIFLDDSGETVPLCETELPLILPELDDFSPTGTGEPPLSKAVSWVKTVDSLSGRPATRETNTMPQWAGSCWYYLRFMDPHNSKELVDKTKERYWGPVDVYVGGAEHAVLHLLYARFWHKVLFDIGVVSTKEPFQCVINQGIILGEVQYMTCRDQVGNLISADSTDMLNEHKLEIIPAEKVMKSGDSFVLKEHPDIRLFARAHKMSKSRGNVVNPDDVVSEYGADSLRLYEMFMGPLRDSKTWSTSGIEGVHRFLGRTWRLIVGSPLSDGTFKDRTVSVDEEPTIEQLRCLHKCIAKYSXVTEEIEGTRFNTGISAMMEFLNAAYKWDKHPRSVIEAFVLLLSPYAPHMAEELWSRLGHTKSLAYEPFPKANPAYLKDSTVVLPVQINGKTRGTIQVEETCTEEDAFVLASRDEKLSKYLDGQSVKKRIYVPGKILNVVLDRKNIKVGVQ

SEQ ID NO: 281743 - protein, 75 aa, Glycine max
  unsure (1)..(75): unsure at all Xaa locations
  Clone ID: PAT_MRT3847_96434C.1.pep
TTPLLLTAAPAAATLGGTPQETGSYRQEIRIAPTSLIQDLLSGCNGPTKMPTTCKFEPLLKVPSSSIMXXRKRTS

SEQ ID NO: 281744 - protein, 103 aa, Glycine max
  Clone ID: PAT_MRT3847_96435C.1.pep
AREKKKKTISEVYWGSGIGKCLETCHDPDRLPIGGGIHHLLWDTGIAGGAEETEADLLIRPTLTAGDPVYMFICLIYFVNYLLCNLNILFIYILLLIFLIMSL

SEQ ID NO: 281745 - protein, 64 aa, Glycine max
  Clone ID: PAT_MRT3847_96436C.1.pep
SAVPVSGLLYIFVVMKLLLGLRTNFCTFGRLVYDRYSLGTVVEFSVLGRSRDQRHLGSMFHRRY

SEQ ID NO: 281746 - protein, 57 aa, Glycine max
  Clone ID: PAT_MRT3847_96437C.1.pep
SLHLASESAIHGMYLRNRSASPSAEIARGSRWSQMMRTVLPWVQADSQSLNTPCQEW

SEQ ID NO: 281747 - protein, 125 aa, Glycine max
  unsure (1)..(125): unsure at all Xaa locations
  Clone ID: PAT_MRT3847_96438C.1.pep
DMFDKGVNLYGKLTDVAVNSFLRSNESPVIEAPRLHNGAXDNKEALIKYKGEQDQDFQILEYHAHNGNAVAMYTADIFYYFVLNFLRRYHSKALWCFLKAADKREPPSMELFGEIYARGAPLERN

SEQ ID NO: 281748 - protein, 107 aa, Glycine max
  unsure (1)..(107): unsure at all Xaa locations
  Clone ID: PAT_MRT3847_96439C.1.pep
FAELMTKIHRRSAKELDKESKFLKKGNSGFVKNIPPKPTGVETFSEXPPLGRIIVRDMRQTASVGVINNVEKKDLTGAKVTKAAHKNKYIVRVGSTGEVGTKKGGFL

SEQ ID NO: 281749 - protein, 118 aa, Glycine max
  unsure (1)..(118): unsure at all Xaa locations
  Clone ID: PAT_MRT3847_9643C.1.pep
MAILLRTRTLLYSKPTTTTLIKTITTFPFLSQEPQLVDSTPPPSYSTTPLPPNLASGSPLYNENWGSPIPPTPTACSYGTFHALAPVGFYNRATXETYDRRALLDHIGDWMASQQWHD

SEQ ID NO: 281750 - protein, 115 aa, Glycine max
  unsure (1)..(115): unsure at all Xaa locations
  Clone ID: PAT_MRT3847_96440C.1.pep
FCLCPXGXXVXXPXVVXAXXXGCVPVLLSXXXVPPFRXVLXWXXFSVXVSXXXXPXLXALLXXXSPRXXXXXXXRVXXXRRPFXVPSPPXXXXVNRKILPSAWLRRLNFRVLDDQ

SEQ ID NO: 281751 - protein, 53 aa, Glycine max
  unsure (1)..(53): unsure at all Xaa locations
  Clone ID: PAT_MRT3847_96441C.1.pep
MDGRNNVHCRKNSWAPHECMSQSTLELCDYDRTATPEQAWRTRXNSHADLLKN

SEQ ID NO: 281752 - protein, 229 aa, Glycine max
  Clone ID: PAT_MRT3847_96442C.1.pep
MSSSGAKRSGPPKHQNKYAWKPNAGRKINETEVGGRFRPLSEITGVCPRCKDQIEWKRRYGKYKPLLQPAKCQRCSKRAVRQAYHSLCPGCAKEHGVCAKCCCNTKQIVGRDISEVEAEQKMLEEAIKNSRERERRSLLRAMNKDKSKSSNSAPTDTKGNKVGQLFPNASLEDYAKLNRVNVGHDDGEICDDSEGEVCEDEDDNSDNEDCDEDGNSDDEDGDSENEDVM

SEQ ID NO: 281753 - protein, 79 aa, Glycine max
  Clone ID: PAT_MRT3847_96443C.1.pep
NASEDDEKPKFGGPRMRCKLCTTAGKLSVFLEWAPSCVCMVNVLVQSSMPNEHVGFPWWPIFFYQNNHRRPYFSKVLLT

SEQ ID NO: 281754 - protein, 171 aa, Glycine max
  unsure (1)..(171): unsure at all Xaa locations
  Clone ID: PAT_MRT3847_96444C.1.pep
QYASPLAIGAGQIDPKQXALIPGLVYDATPQDYVNLLCALKYTQKQILTITRSTSYNCAKPSFDLNYPSFIAFYRNNTRSVVHKFRRTVTNVGDGAATYRAKVTQPKGSVVTVSPETLTFRYKNEKLSYDVVIKYSKYKKKNISFGDLVWVEEGGTHSVRSPIVVAPSGIV

SEQ ID NO: 281755 - protein, 188 aa, Glycine max
  unsure (1)..(188): unsure at all Xaa locations
  Clone ID: PAT_MRT3847_96445C.1.pep
MDPEIVKKLGSSLLVPSVQELAKQGITKVPERYVRPNEDPCVEYDTTSLPQVPVIDLSKLLSEDDAAELEKLDHACKEWGFFQLINHGVNPCLVEYMKKNVQELFNLPHEEKKLLWQKPGEMEGFGQMFVVSEEHKLXWADLFYISTLPSYARHPHLFPNIPRQFRDNLEKYSLELKKLCILIFEFMT

SEQ ID NO: 281756 - protein, 70 aa, Glycine max
  unsure (1)..(70): unsure at all Xaa locations
  Clone ID: PAT_MRT3847_96446C.1.pep
NHEFSNHYFTLPTKXFXRTPSPXPPXXIXPYXGSESXXCSLRGXXVGDGILIPXRRXIYXXXXIFDFTHX

SEQ ID NO: 281757 - protein, 81 aa, Glycine max
  Clone ID: PAT_MRT3847_96447C.1.pep
QHHTSTIAMLWKICFNVKIIFFLGKGALTVWVGTLKLNPKKKNLVEINQCRFLFHPKVGKWECIAGFWGKKVDKNQKKNNM

SEQ ID NO: 281758 - protein, 147 aa, Glycine max
  Clone ID: PAT_MRT3847_96448C.1.pep
WVGGMAWSCLSSLQSALGAVVLKQGLIAYLGASVPAVQVISRPLERAIRYGVRRICVGWAGELLSASGSVAFLRMIIDYGQVRAFNGIVFWVSACPIDVLLFCLMIPSPHDWVWWSPRLYVYSELYLSAQVRVIWKGGLLEGPSDIG

SEQ ID NO: 281759 - protein, 82 aa, Glycine max
  Clone ID: PAT_MRT3847_96449C.1.pep
FVKSNGCCQVPSKKRKGYFIPQAILETDVNPVMWFQSHQKPLNPPQLVVPNLIPYSLQFETKLLKIKCLGISELQKGKVTKP

SEQ ID NO: 281760 - protein, 112 aa, Glycine max
  Clone ID: PAT_MRT3847_9644C.1.pep
PSLLWWFIFKTFSSIKISTETYLTNKLGRFNPINMLNTLLCKCITFASTSRYPILHHYPLPFSLRFYTTTTSNSRSFAVSYLIHNFGFFPESASKVSENHKNYFRTPEKPES

SEQ ID NO: 281761 - protein, 135 aa, Glycine max
  Clone ID: PAT_MRT3847_96450C.1.pep
NAQRSEINLEGPLWVPAIGGANVLIVNNPQMPGLIPIAKKIGPQRPIIFRSHIQIRNDLVNQPGTSQANAWKVMWENVKQADCFIAHPVKTFVPRNVPSEMVGYMPATTDWLDGLNKHMRDWDIAHYGRLLNVAC

SEQ ID NO: 281762 - protein, 381 aa, Glycine max
  Clone ID: PAT_MRT3847_96451C.1.pep
MGDLFHFDKNLSSQDEISLFLRQILLRSSSPSHSMPAGSCTSNAAQQNVNAHHPSFTASQLQDGKILALDSTASFVSGSAACSSFKGHGASAANVSSSSAGVSENENDDYDCESEEGVEAPAEEVPTKAASSRSSSKRSRAAEVHNLSEKRRRGRINEKMKALQNLIPNSNKTDKASMLDEAIEYLKQLQLQVQMLSMRNGLSLHPMCFPEGLQPLQLSQMGMELSERNRFTSLNMSATLPLHQDNNPLHYASNLPNKHNLPNQPSVPYPPYIDNPETSFGLEPRIQTDMKPLQHKGGSSEPIRGEDILQHQQSSGIHSDANTLGGSQVVKEFESGTRLSFPFDTQACEPKDNSNSSQPCIGGRDHSGVIIRNSETNIVGR

SEQ ID NO: 281763 - protein, 158 aa, Glycine max
  unsure (1)..(158): unsure at all Xaa locations
  Clone ID: PAT_MRT3847_96452C.1.pep
MAFRCSIVTXTILCSLALAGESHGHASLPEEDYGEADWPNTAIRTALRELIKPLRAGVESDERPMHIDDTQYPNTFFYKEDLNSGKTVKVQFTKRPYAQPYGGYTWLTDIKDTSTEGCRSEEICIMTEAYDAEEKFRAXSLGTVNGCAISKLGKNIQV

SEQ ID NO: 281764 - protein, 78 aa, Glycine max
  Clone ID: PAT_MRT3847_96453C.1.pep
MNLGAAEEEESAAQVRVPAEIDWHKLDKSKFFCLGAALFSGVSATLYPVVVLKTRQPVFPSPISCIRTAFSLIRLEGL

SEQ ID NO: 281765 - protein, 68 aa, Glycine max
  Clone ID: PAT_MRT3847_96454C.1.pep
GAISSFPRTFILADHMYLKAKKDKLFRSQKLWHRFKIGFYAVMSLAASILTMRFLSVVSKTNHVLGDL

SEQ ID NO: 281766 - protein, 83 aa, Glycine max
  unsure (1)..(83): unsure at all Xaa locations
  Clone ID: PAT_MRT3847_96455C.1.pep
PILSVVEIKRLQNSFLIKXVMKRLKTIVPIIPLIRSLAKAKFCKVFGPPISNPVGANLSDFDIIARFLRXISRNFFHYSNGSA

SEQ ID NO: 281767 - protein, 90 aa, Glycine max
  Clone ID: PAT_MRT3847_96456C.1.pep
FNKTVNNGKGKIMTTGYMLIRHLHTTETERQQILYTEPLAAQHPVACVTRNLLKEHEPLTNRLDEETLIYTSPDTHLATRLGAQASWRTM

SEQ ID NO: 281768 - protein, 170 aa, Glycine max
  unsure (1)..(170): unsure at all Xaa locations
  Clone ID: PAT_MRT3847_96457C.1.pep
MRHIDVWSPTRDSSLGGFHYFVTFIDVFSCKVXVYFTKQKSEVFEKFKLWKVEVENQTHRKIGYLGSDNGTEYTDSWFQKFYKEHDIXRDFSVRKTPQXNVVERMNRCLTERVRCLRLQVGLFKGFGTXPVNMACYLLNRSPQASLDGKVVXEVWTSNPVDFNNLSIFGC

SEQ ID NO: 281769 - protein, 54 aa, Glycine max
  Clone ID: PAT_MRT3847_96458C.1.pep
SSSSRIWIIWRYEISCVWDMLLNISNSVLLFFRVGNVNIYFKNKGHDLGDLLCE

SEQ ID NO: 281770 - protein, 155 aa, Glycine max
  unsure (1)..(155): unsure at all Xaa locations
  Clone ID: PAT_MRT3847_96459C.1.pep
QLAQKGKRLNGGKXPFPDGTLFREYFIGDTGFPLFSWLLTPYEGKGFSNVQVEFNKRVVETQMVAKKALARLKDMWKIIQGVMWKPYKPQFPKIIFVCCILPNIVFDMEDEVLIDMPSCPQHDLRYQGPTSEFAGNTAPLMREKLFFFLFGKLPT

SEQ ID NO: 281771 - protein, 50 aa, Glycine max
  Clone ID: PAT_MRT3847_9645C.1.pep
ILHAKYLFWIITMLEEFSDTQLGQEFMNNKELFKLEFIDTNCFPHPLVQT

SEQ ID NO: 281772 - protein, 68 aa, Glycine max
  Clone ID: PAT_MRT3847_96460C.1.pep
LQWKCVFCLRIHYGGWGGEAKLREGILQKKIGLPLITDLNDLVESKGGKKKSASPEAFLCEDTLRYII

SEQ ID NO: 281773 - protein, 329 aa, Glycine max
  Clone ID: PAT_MRT3847_96461C.1.pep
IIKELYHFKKKKKKNKIKSVSSWGFGDETKPWATKLVYSVDLWQDQVRCFIEEVIGEPVYLVGNSLGGLVALYFAANNPHLVKGVALLNATPFWGFLPNPIKSPRLAKIFPWAGTFPLPSSIKRLTELLWEKISDPKSIAEVLSQVYADHSTNVDNVFSRIVETTRHPAAAASFASIMFAPQGELSFNETLSRCRANNVPICLMYGKEDPWVGPIWGLQVKRQVPEAPYYQISPAGHCPHDEVPEIINFLLRGWIRNLESQGSVSLPLLEDLDSMKHSIIDRELEFPREGSKKSVMVRYFASNFSLWDRIRSFIRSQSKFSNILAAKPQ

SEQ ID NO: 281774 - protein, 178 aa, Glycine max
  unsure (1)..(178): unsure at all Xaa locations
  Clone ID: PAT_MRT3847_96462C.1.pep
METLSYGSAPCCQVVNSKWKLVEKSLSSRQSRVSSIGKLGVYYTGTISACAPVRFYEMGTRVQLRSSKRFNFKVCSGSYDDGYVIGEEEARDISGLEEPVTTKVLIPGLPDDSKGESGAPISSCFWGWKPKLNVHYEKXAGCENVNDLPRVLFLPRFGVGSFHYEKQLKDFGRDYECG

SEQ ID NO: 281775 - protein, 60 aa, Glycine max
  unsure (1)..(60): unsure at all Xaa locations
  Clone ID: PAT_MRT3847_96463C.1.pep
FMGALDYIFHPPDFLVGQFLLELLDXESFRKDPAFSFLEWFSDPLVFLGEFRCCKNKFRR

SEQ ID NO: 281776 - protein, 43 aa, Glycine max
  Clone ID: PAT_MRT3847_96464C.1.pep
PGHVLPVYSYVSLDDGVGLDCLLAPVHALSLNIEARIHVPSGC

SEQ ID NO: 281777 - protein, 230 aa, Glycine max
  unsure (1)..(230): unsure at all Xaa locations
  Clone ID: PAT_MRT3847_96465C.1.pep
MMRRDQIRAREMRTPSLVDLCVQKVIDNVRYLGNVGSLDQHLLEQILPHCTADQLMHVEKSTKGRNLSPVTDKLWKKFYEKQFGTNNTNEVIKRMKEKRVNFRXMQLYEAKGKERAQAENEALDRIRQLYKKEDARKQSRQVRTCTKVPPSSKRRFWGDNGPGYNVSNVKSNIMKKAKIEFLKSHEVKNLAAMKNKSIQRNPSSSSFKKTGSISGIGSTSKDPKPTKRVF

SEQ ID NO: 281778 - protein, 141 aa, Glycine max
  Clone ID: PAT_MRT3847_96466C.1.pep
KSQKFVEAIDLSVKFFNWVESPHEHSHFQPVVDNTINAFHCLIESNHKDHPDLQSQTRHHPKSNPNPFSILLFTKVYNPNPSRSLSFSACPTTLTPPTSSQFSQWKAWGRLLFFAHFWIVTIICEERSKGLMALVRMVRRP

SEQ ID NO: 281779 - protein, 55 aa, Glycine max
  Clone ID: PAT_MRT3847_96467C.1.pep
RNHKLTYTYMQRRPFYIVQLKFTSLPVILQPLDSQNPIFTHLNHLAAHPKFPQLA

SEQ ID NO: 281780 - protein, 86 aa, Glycine max
  Clone ID: PAT_MRT3847_96468C.1.pep
YKVLLDNRLGQQMFDGGYVHHGLLKSAVWLLNRESETLKRLWVENGSEYEMVFAGHSLGSGVVSLLTILVVNHRDRLGGIPKEKIR

SEQ ID NO: 281781 - protein, 59 aa, Glycine max
  unsure (1)..(59): unsure at all Xaa locations
  Clone ID: PAT_MRT3847_96469C.1.pep
LGTTQQESQLAXVVSSSSKYGQDQKPKGTKKDRPICTHCETSLETSRINVANYTDFTWL

SEQ ID NO: 281782 - protein, 70 aa, Glycine max
  Clone ID: PAT_MRT3847_9646C.1.pep
INFTYNSKRQFVLVCNLVISCSSCAFHLTWMKPLARFQLSELHATFVFSVEAGRQLKFGVRFVFIVIVFI

SEQ ID NO: 281783 - protein, 87 aa, Glycine max
  Clone ID: PAT_MRT3847_96470C.1.pep
TTQQKAMLEQTHMFVTNFLFEKPRLLQENFQVAGDSQILTQTSGGKTLMDTPGKISPKAFPRGAPQKDQPLGPRESNFKPPPKGPQN

SEQ ID NO: 281784 - protein, 77 aa, Glycine max
  unsure (1)..(77): unsure at all Xaa locations
  Clone ID: PAT_MRT3847_96471C.1.pep
MFVSCIRMHSHVNHTYVVKLMGLSGSRRPVIQVRVMSVDDLKLQILTTVAXPVRQCDIHSLTESEREAGQWRLTVAC

SEQ ID NO: 281785 - protein, 513 aa, Glycine max
  Clone ID: PAT_MRT3847_96472C.1.pep
MAPTLTSNSSFITSTPHSRVTLRNPRLRVFAKKSGSFPSFGLGKPKDDSSSSTEEKDGSSNSNPFRLDFGKISLIPVPSNTSAPGFSFGKPRRKDPSTVFVAGATGQAGIRIAQTLLREGFSVRAGVPELASAQELARLAAQYKIISNEQAKRLNAVQSSFDNADTIAKAIGNASKVVVTIGPTENGPTTEVSASDALQVVQAAQLAGVGHVAVIYDESSAGASTYNVLDGLSSFFSNLFSRSQPLTIQEFLQKVIETDVKYTFIKTSLTDDFSPESSYNVVVLGEGSDGANDYKVAKSKIASLVADVFSNTEVAENKVVKVYSDPGAPLKRVDELFSPIPEDGRRKAYAEMQEKAKAEEEARVAAEKANEASESAKKLEEEVKKLLQQEARAASLAQEAQEKAEAAGASVENLLNKAKDFGAGFSWEKLSSQITTSIQKPDEDEKPKVQLATVRGQAKARNLAPNKAVVRQTSQRSAGKPKVEKPKQAETPKEVRNVFGGLFKQETIYVDDD

SEQ ID NO: 281786 - protein, 53 aa, Glycine max
  Clone ID: PAT_MRT3847_96473C.1.pep
FMLLDSMFVVAHLLLRTTTKKLGYLLIILRFHITYALWYGKVILLFFIYTFVN

SEQ ID NO: 281787 - protein, 519 aa, Glycine max
  unsure (1)..(519): unsure at all Xaa locations
  Clone ID: PAT_MRT3847_96474C.1.pep
MAPTLTSNSSFLSTSPHSRVSLRNPRLRVFAKKSGSFPSFGLGKPKDDSSSAEEKDNSSNSNPFRLDFGKIPDVTSLIPVPSNTSAPGFSFGNTRRKDPSTVFVAGATGQAGIRIAQTLLREGFSVRAGVPELGSAQELARLATQYKIISNEQAKRLNAVQSSFDNADTIAKAIGNAGKVVVTIGPTENGPTAEVSASDALQVVQAAQLAGVGHVAIVYDKSSAGASTYNVLDGLSSFFNNLFSRSQPLTIQEFLQKVIETDVKYTFIKTSLTDDFSPESSYNVVVLGEGSASANDYKVXNVAKSKIASLVADVFSNTEVAENKVVKVHSDPSAPLKRVDELFSPIPEDGRRKAYAEMQEKAKAEEEARVAAEKAREASESAKKLEEEVKRLSQQETRAASLAQEAQEKAEAGGASVENLLNKAKDFGAGFSWEKLSSQITTSIQKPDEDEKPKVQLATVRGQAKARNLAPNKAVVKQTPQRSAAKPKVEKPKQTETPKEVRNVFGGLFKQETIYVDDD

SEQ ID NO: 281788 - protein, 99 aa, Glycine max
  unsure (1)..(99): unsure at all Xaa locations
  Clone ID: PAT_MRT3847_96475C.1.pep
FLLLVDFFFLRRLWPSCRSRSSAFPFFPPAWFGASSGLFAWFGVVRLCWFGSGWVSASGLATWSLVFSLLCFLPSLGVSAPAPFSVFSPLXLCVFAFLN

SEQ ID NO: 281789 - protein, 130 aa, Glycine max
  Clone ID: PAT_MRT3847_96476C.1.pep
MPTKNISIERPEQVAHLDTFYAGSADFICTLILTIAGMGTGIDYNKLTDNGTVTPADLMSASIDHAFDLLGAGADSTNIYGGHENPAITLCASVSGAITLLRVIGYVMTQRVGFIVTYLVLALDTASHCI

SEQ ID NO: 281790 - protein, 292 aa, Glycine max
  unsure (1)..(292): unsure at all Xaa locations
  Clone ID: PAT_MRT3847_96477C.1.pep
NPTPSIILFSSQNPTIPYPLSVSAHSESFPKTTKAFATFQNAAKTSGPAAAAVGGKLIRTELLSSAWTGFFAGCLHTLSGPDHLAALAPLSIGRTQMESAAVGALWGCGHDAGQVIFGLIFLLLKDRLHIEIIQTWGTPCGLAFTLXLVIGAMGIKEAXSEVPTPCVALENGECDVSVYESRDSNPVVGKKKIGFATFATGIVHGLQPDALMMVLPALALPSRLAGAAFLIMFLLGTVVAMGSYTVFIGSCSEALKDRVPRITEKLTWASSLIAIALGFAIIISQFFGFSLY

SEQ ID NO: 281791 - protein, 64 aa, Glycine max
  Clone ID: PAT_MRT3847_96478C.1.pep
KGDYPRRNLNQFFINSFCSPLKGGKGRFFIQIRCFGFKKIQNSFPSLCFCSIFVGFFAFFFCEG

SEQ ID NO: 281792 - protein, 100 aa, Glycine max
  Clone ID: PAT_MRT3847_96479C.1.pep
IFFLYFSFLRFNFGCLANLKTRPLSLLTKTNIRCSIPLHASFNTLFTMISITAYKNSPIFNHPFLDGHPVKIKSLPLSFDVPRNPIPPLIYHHLCVKMAP

SEQ ID NO: 281793 - protein, 89 aa, Glycine max
  Clone ID: PAT_MRT3847_9647C.1.pep
LEIADLSRDLGLTILKGVMEAPNDKIWARFAVEANRDLTRMEIFMSLVRLLEKTVKGNTSPSNAIDNMVYHSFPQAAQIPVTGRPSSLQ

SEQ ID NO: 281794 - protein, 50 aa, Glycine max
  Clone ID: PAT_MRT3847_96480C.1.pep
HWLWQCYFNSMSNIEETRENLSTTNNGSLKFRNSIIFNYKAPMFDIHLID

SEQ ID NO: 281795 - protein, 95 aa, Glycine max
  Clone ID: PAT_MRT3847_96481C.1.pep
MSKIYIFSSQQSMGAFFEAGTRHTYTDVAIWIEIEASESYLVCSMYKESAQLASSGLERSRHSHHDLDRARYVGIKCYACCHRHSTFFYPTHHTF

SEQ ID NO: 281796 - protein, 65 aa, Glycine max
  unsure (1)..(65): unsure at all Xaa locations
  Clone ID: PAT_MRT3847_96482C.1.pep
CHXQPLPINSIVAWFMTIPNSGMILVGILSPALTVSLFLLYPEPHSHPPXXXXXXXXXSXLFFLY

SEQ ID NO: 281797 - protein, 79 aa, Glycine max
  Clone ID: PAT_MRT3847_96483C.1.pep
PFRGAEKRINLKELLNLIFLSQIPISIISNSKFLHSFCFGSSRHQINIDSLSRLVRYSIPSFYYLRKGNFISLFTICGI

SEQ ID NO: 281798 - protein, 229 aa, Glycine max
  unsure (1)..(229): unsure at all Xaa locations
  Clone ID: PAT_MRT3847_96484C.1.pep
MHFVIHTDHKSLKHLKGQGKLNXRHAKWLEFIELFPYVIXKGKENIVVDALSRRYVILTSLEVRLISFEYVKDLYXNNGDFAEIFAACENGAFGKFYRVXGYLFRENKLCLNXSMHELLVREAHGGLMGYFGVKKTLDVVHEHFFWPKMKLDVERIFGRCITCKKEKSRVLPQALYTLLPVPNEPXVEISMDXILGLPGSRXDXDSIFVVVDRFSKMTHFIPCHKIDDI

SEQ ID NO: 281799 - protein, 287 aa, Glycine max
  Clone ID: PAT_MRT3847_96485C.1.pep
MSQQVLRPLRQWPWFHHHHHRTCVTLSLHHLLTPPPKTSHRFSFATVAASSRPKVRTPKSPVPPPPTADSDLEEKKSRNQLKREARRTVKWGMDLASFSPPQIKRILRVASSDHLLLFEALMLVKRLGPDVREGRRRQFSYIGKLLREVDPELMERLIKATKDSNQKELQALTGLGPDDPEPEDDDDLVESESEEDEEESNWHDNQVARWFDGLISKDIEITNEIYSVQGVEFDRQELRKLVRRVHNTQEMKADNEEEKKKIETATNGAKKALNRFLRGLSKRIPNE

SEQ ID NO: 281800 - protein, 35 aa, Glycine max
  Clone ID: PAT_MRT3847_96486C.1.pep
LFVIYHYDYFGGLFISLTHLFWNHLYVFIFKSREV

SEQ ID NO: 281801 - protein, 62 aa, Glycine max
  Clone ID: PAT_MRT3847_96487C.1.pep
SSCVSILVIRALDSVGTIICISFVSIFNCRCFLSISQSEVCLVFRALSFFSPFQCNMPPIYE

SEQ ID NO: 281802 - protein, 100 aa, Glycine max
  unsure (1)..(100): unsure at all Xaa locations
  Clone ID: PAT_MRT3847_96488C.1.pep
AGTDIFIVHCXQSYAIHYHPSGNQINIVLSKDGDILNPGSPFCAIQYILDVVDXDLVMCVHPFCGGHSNIESHLRRMSDLRRLSAEKGMNPLIAKDRGVG

SEQ ID NO: 281803 - protein, 40 aa, Glycine max
  Clone ID: PAT_MRT3847_96489C.1.pep
LFPYFVLIIIIFCVMLTFIFNPCRTWVYFLDFELFIICIF

SEQ ID NO: 281804 - protein, 503 aa, Glycine max
  Clone ID: PAT_MRT3847_9648C.1.pep
MYKVGFGLQSNNTTTNAVLCSVPNFTNQSVSNHMNLEGSGQKSLSIDLKQVWDAFASTDQRIDDDLLQAALKIPSLHLEEHVPMGDHISGFVQDCLSKDLTSQHMMKMNVKHAEADAQLPSGDDLFDVLGMDLKRRLLNGSWNKLLATDSDDNTEHLDKKATCMNLQGVGPDNSYSVNEAISESGIFSGTGTDHLLDAVVSKAQSAAKQNSDEMSCRTTLTRISTASIPSPVCKQVMPDHVAPRGLSGCSKDDAGNCSQTTSIYGSKLSSWVENSSNFKRESSVSTGYSKRPDEVCKSNRKRLKPGENPRPRPKDRQMIQDRVKELREIVPNGAKCSIDALLEKTIKHMLFLQRVTKRADKLQQSEYSKYVNNFEGGATWAYEVGSLSMVCPIVVEDLIPPRQMLVEMLCEERGCFLEIADLIRGLGLTILKGVMEAHNDKIWARFAVEANRDITRMEIFMSLVCLLEQTVKGNTSSSNAIDNMVYHSFPQATQTTERSSSLQ

SEQ ID NO: 281805 - protein, 314 aa, Glycine max
  unsure (1)..(314): unsure at all Xaa locations
  Clone ID: PAT_MRT3847_96490C.1.pep
MSSFVGVLVSDQWLQSQFTQVELRTLKSKYVSERTQSGRVTVGNLPPIFKKLKAFSELFTEDEIKDALAESYQNMDEEIDFESFLRAHLNLQSRAIAKDGGSKSSSSFLKAATTTVHHAINESEKASYVAHINNYLAEDKFMSQFLPIDPSTNALFDLAKDGVLLCKLINIAVPGTIDERAINTKRVLNPWERNENHTLGLNSAKAIGCTVVNIGTQDLIEGRPHLVLGLISQVIKIQLLADLNLKKTPQLVELVEDDKDVEELIXLAPDXLLLKWMNFHLKKAGYEKQVTNFSFDLKEGEAYAYLLNALAPTR

SEQ ID NO: 281806 - protein, 69 aa, Glycine max
  unsure (1)..(69): unsure at all Xaa locations
  Clone ID: PAT_MRT3847_96491C.1.pep
GKGFHTFFDADRLQRWEELSPAVLTAISASKVASSGHSCNHASSSWRXDDHGHSFHCMREWLLVITVIY

SEQ ID NO: 281807 - protein, 117 aa, Glycine max
  Clone ID: PAT_MRT3847_96492C.1.pep
RKHCAKKERERNTHRVMKRQSSAVSPSSSRRETPPEKIHAKTIGCMSGILHFISSSNSRRSRRFLTFGKRQINKNPASTPADAGNLPPENAAADDWRLSSDVPRSPTLPAEIRRSSA

SEQ ID NO: 281808 - protein, 95 aa, Glycine max
  Clone ID: PAT_MRT3847_96493C.1.pep
AQETFLFTSESMNEGHPDKLCDQISDAELDACLEQDPDSKAACETCTKTNMVMDSGEITTNANVDYEKIVRDTCRNIGLVSDDVGRDADNCEVHV

SEQ ID NO: 281809 - protein, 75 aa, Glycine max
  Clone ID: PAT_MRT3847_96494C.1.pep
YEWRHNNTKKNNNTHHPFFSSPTQGAAPIQVPLFDPQRGELRLLLWRPNINYIYLVLHRFTRSNPCVDQSNMSGS

SEQ ID NO: 281810 - protein, 45 aa, Glycine max
  Clone ID: PAT_MRT3847_96495C.1.pep
FSVQNLVTFKDLHPAISVIMHILSSHTPILLNLSICAFASELNWF

SEQ ID NO: 281811 - protein, 129 aa, Glycine max
  unsure (1)..(129): unsure at all Xaa locations
  Clone ID: PAT_MRT3847_96496C.1.pep
RCSFLGHIEMYCNQKNCDNFTSLMRELDFPRKIYNRKTYAFECSAIKIPYNTYNSGNVILRYIWNMTINRGYAGIIVXYQHFVIRNYSPPAQMSNSIGMKVRIKHLGHMGCXYNKGNYDLIYVISNGIY

SEQ ID NO: 281812 - protein, 60 aa, Glycine max
  Clone ID: PAT_MRT3847_96497C.1.pep
RLGTRSLVATVAKLSVVAPQWATFDSKMERRNAPSDERSSPLVTQECERHKELDHCIRNL

SEQ ID NO: 281813 - protein, 76 aa, Glycine max
  Clone ID: PAT_MRT3847_96498C.1.pep
FFLGVPEGLFFFNPGMETSFLSFEAPLGGPPFPPGGLSRTPLGFDILAFSPPPLIFWAFHFPWAPFNFGFVPWCAG

SEQ ID NO: 281814 - protein, 96 aa, Glycine max
  Clone ID: PAT_MRT3847_96499C.1.pep
SLSLREGVLGDSCSYLYHQGYGYTPYGAPMQHDDNLYGLQQYQYPSSYYQSPASADGSFAANKINAQEGRISAAASAEHIPSSAVINKGKLHWCGE

SEQ ID NO: 281815 - protein, 86 aa, Glycine max
  Clone ID: PAT_MRT3847_9649C.1.pep
TNRSIVPCKLGCFDRYIYYFCISVFIFINILILSIFIVLCGNYIYREDLWLGSHVKHSIGKLIAIICCPNIAGRNKENSISFWRTV

SEQ ID NO: 281816 - protein, 159 aa, Glycine max
  unsure (1)..(159): unsure at all Xaa locations
  Clone ID: PAT_MRT3847_964C.1.pep
MGKEKVHISIVDIGHVNCVKYTTTGHLIYKLVGIDMRAIERLEKEAADMNNRCFKNAWVLDQHKGERERGITTDVASWNFDTTNNYGTFIDPRERTDFIRNVIAGTCQADXAVVIIESTTAGLEAGISKDGRTLXHALAYITLGVKHMICCCDTMDATT

SEQ ID NO: 281817 - protein, 153 aa, Glycine max
  Clone ID: PAT_MRT3847_96500C.1.pep
QGVLGDSCSYLYHQGYGYTPYGAPMQHDDNLYGLQQYQYPSSYYQSPASADGSFAANKINAQEGRISAAASAEHIPSSAVINKGSSIGVVNEGSTNNNGVKEFLSSTQRPLLNSNDSYQRAGFPVYAPLSGYQDPRVGPHGTQPALFGSLIIF

SEQ ID NO: 281818 - protein, 184 aa, Glycine max
  unsure (1)..(184): unsure at all Xaa locations
  Clone ID: PAT_MRT3847_96501C.1.pep
MGSLMASATLTLVLAIVSLSLPSQISAHNYLYSSPPPPKKPYYYHSPPPPSPPPPKKPYYYFSPPPPKKPYYYHSPPPPSPPPPYKKPYYYHSPPPPSPPPPKKPYYYHSPPPPXYVYHSPPPPPKKPYYYHSPPPPVHHHPYPHPHPHPHPYPHPHPHPHPHPPLHYHSPPPPPKKPYKYPSP

SEQ ID NO: 281819 - protein, 157 aa, Glycine max
  Clone ID: PAT_MRT3847_96502C.1.pep
WSSVPADTSTEVLEKEKLILQTTSRTKHFGIQRKPLPLEPTVLLREANRRRASLSAGNVSEIFDSRQGPMDGSGFDASTRMSPQKALASSMSRTNSSPGNFDSSIDRPMRLAEIFVAAEHALKQTISNPELGKSLSSSEEFEQKYLELTKGAADNYH

SEQ ID NO: 281820 - protein, 163 aa, Glycine max
  Clone ID: PAT_MRT3847_96503C.1.pep
YPPPPPKKPYYYHSPPPPKKPYYYHSPPPPSPPPPYKKPYYYHSPPPPSPPPPKKPYYYHSPPPPPKKPYYYHSPPPPSPPPPYKKPYFYHSPPPPPKKPYYYHSPPPPVHHHPYPHPHPHPHPYPHPHPHPHPHPPYVYHSPPPPPYKKPYIYASPPPPYHY

SEQ ID NO: 281821 - protein, 55 aa, Glycine max
  Clone ID: PAT_MRT3847_96504C.1.pep
MGKDKVHIDILASEHVDSGKSTTTGHLIYKLGGIDKRVIQRLETEATEMNKRSFK

SEQ ID NO: 281822 - protein, 70 aa, Glycine max
  unsure (1)..(70): unsure at all Xaa locations
  Clone ID: PAT_MRT3847_96505C.1.pep
MQSLCQCSIDLLGGGILVDKTGYCITLIRNSPISNLCRVAAWKKGMLMVXIVMSGNAXAVRRTDSASLVQ

SEQ ID NO: 281823 - protein, 186 aa, Glycine max
  Clone ID: PAT_MRT3847_96506C.1.pep
HAYGPPPPSAPPPKKPYYYHSPPPPSPAPPKPYYYHSPPPPPKKKPYYYHSPPPSPKKPYKYPSPPPPVHPYPDPHPHPHPHPHPDPDPPYVYHSAPPPPKKPYYHPPPPPPKKKPYYYHSPPPHHPKKPYYYHSPPPPPKKPYKYPSPPPPVHPPYIPHPVYHSTPPPPYKKPYIYASPPPPYHY

SEQ ID NO: 281824 - protein, 342 aa, Glycine max
  unsure (1)..(342): unsure at all Xaa locations
  Clone ID: PAT_MRT3847_96507C.1.pep
KPYYYHSPPXPSPPPPKKPYYYHSPPPPKKPYYYHSPPPPSPPPPYKKPYYYHSPPPPSPPPPKKPYYYHSPPPPPKKPYYYHSPPPPSPPPPYKKPYYYHSPPPPSPPPPKKPYYYHSPPPPSPPPPKPYYYHSPPPRPKKKPYXYYHSPPPPSSKKAYYYHSPRPPPKKPYKYPSPPPPVHPYPHPHPHPHPHPHPHPHPPYVYHSPPPPPKKPYYYHSPPPPVHHHPYPHLHPHPHPHPPPPPKKPYYYHSPPPPVHPHPYPHPHPHPHPYPHPHPHPHPHPPYVYHSPPPPPKKPYKYPSPPPPVHPPYIPHPVYHSPPPPPYKKPYIYASPPPPYHY

SEQ ID NO: 281825 - protein, 96 aa, Glycine max
  unsure (1)..(96): unsure at all Xaa locations
  Clone ID: PAT_MRT3847_96508C.1.pep
APPGGGLWGVFLGNPLFPPGGEPPPVPGVLGPPLLPKGXLGPPGGPKPRGPIPPPGVGPLVGGGPKPVAEGGAPRPPPKNPPWGVGVCPPPHEKRG

SEQ ID NO: 281826 - protein, 73 aa, Glycine max
  Clone ID: PAT_MRT3847_96509C.1.pep
FHRLIIRSKTWHDERLNVISGICSYGVCCAVQCILLAICRSVSTPSLNKQIPSICVLQPRAEFRAEGSVHATS

SEQ ID NO: 281827 - protein, 75 aa, Glycine max
  Clone ID: PAT_MRT3847_9650C.1.pep
FLLIPISKKLQLIKTCSSLHFKFNSTVFETPLGRRLKEKLTSTMCKYMVKQTNPFTLTICQKKNTYPNLSHLKKK

SEQ ID NO: 281828 - protein, 401 aa, Glycine max
  unsure (1)..(401): unsure at all Xaa locations
  Clone ID: PAT_MRT3847_96510C.1.pep
LEAQSRDNKFPSLRSYNSGSLVDFFSEPVQASEPLQNKAFGIPRPPGPTRSVSMDLSKAPLESASSVDLFQLPAAPSQAPTLDLFQSSLSSADPSFNENQLSQTSHLASIDFFSDFSPQPSTVTSDGKALELSVPKNEGWATFDMPQRTSSTAQVXFQPLAKSLHETFDPFSSSNANRQWPSFEISSVSVPSSVTSNLWHDGVWNGEEQVSAMAANTQPWNAFEDSGGHHPVDSLSQGLQLHNFPSADNHILGLRESEGSNEDGVKGIAPVGRFDNHDIPSHVSCSAYPPPMLPPMGDIQHNETKSKSTNPFDYPYETDVDHNNMFLDMGSLQAALPDALFPATFHGGIAESWLPQNPVTSCISSAGEGGLSFMAMQSPSSQIQNIQKPEPVASIGGNPFA

SEQ ID NO: 281829 - protein, 171 aa, Glycine max
  Clone ID: PAT_MRT3847_96511C.1.pep
MGNTTSCSCICISNGVISIGNILKKRRKAKKTAMLLDSDGNTREIKLPIKSGELMIEEFGHVVTPVDELRRTGRVSALLADEELVAGKVYLLLPVNRINSKSSEFEMANAEKQRKHTKSKRGNNRVIIWRSLISRSNERDEENQVTVSVFPVCPRFGNQVRWNPVLDPIVE

SEQ ID NO: 281830 - protein, 88 aa, Glycine max
  Clone ID: PAT_MRT3847_96512C.1.pep
YSHDWCVVFRNKFLDMSSLQAALPDALFPATFHGGIAESWLPQNPVTPYISSAGKGGLSFMAMQSPSTQIQNIQKPETVDSIRGNPFA

SEQ ID NO: 281831 - protein, 183 aa, Glycine max
  unsure (1)..(183): unsure at all Xaa locations
  Clone ID: PAT_MRT3847_96513C.1.pep
VSSFVDLSQSIPEFARXIMMDLYRAIDIYLKEHPSLTKAERKKICGLMDVKKLTVEASMHAAQNERLPLRVVVQVLYFEQARGASNARTLGNSPRNSTNTHVRDKEFHKNGKLNKSSKNSRSGMQLLPSGSRRIFDKLWIVGKGQGENRSSETSGSSNSPTSVVPGDTKSSGSSLRHRRLSIS

SEQ ID NO: 281832 - protein, 51 aa, Glycine max
  Clone ID: PAT_MRT3847_96514C.1.pep
TWLVRARLVSDWRMKILTLRWGVGLPPHSVFFFLVGLGFSRASQKGKGEAS

SEQ ID NO: 281833 - protein, 37 aa, Glycine max
  unsure (1)..(37): unsure at all Xaa locations
  Clone ID: PAT_MRT3847_96515C.1.pep
LXMNXXLGWYXYQXSNLCYXTCRGITXQDLSXPLRGX

SEQ ID NO: 281834 - protein, 39 aa, Glycine max
  Clone ID: PAT_MRT3847_96516C.1.pep
SRAASARDEQGGQQVSCIILCTVVGSSGPRHESAWFPAW

SEQ ID NO: 281835 - protein, 63 aa, Glycine max
  Clone ID: PAT_MRT3847_96517C.1.pep
VCLPCLALQMCIKSQYLSPNRWIHSALNMPFILLQGVVYPFYPCHHCRGLNSNGSVGNYHYHF

SEQ ID NO: 281836 - protein, 94 aa, Glycine max
  Clone ID: PAT_MRT3847_96518C.1.pep
IHHVMILMSLFNMRNGMHVSFLQPFITRISLHFLLIVLLCMVQIRIVILIISIIHISLPVFPFLIGLVLQMLLCSRHVLSSLRYIITPLIIVAL

SEQ ID NO: 281837 - protein, 58 aa, Glycine max
  Clone ID: PAT_MRT3847_96519C.1.pep
TFDYFWGGPATSLVNLTNTFGSFGSRAAIVKSTPPRFTMCSLQGEIPNMHVFRNLIPA

SEQ ID NO: 281838 - protein, 142 aa, Glycine max
  unsure (1)..(142): unsure at all Xaa locations
  Clone ID: PAT_MRT3847_9651C.1.pep
MQHCTAISVYEALALESHDIIHLIMLDCAGNSIPLPNVASGILANVIKISWKYVXAENTEDEPSXDELRCXDTNIMRGEQATLCHLFLSANYLNIDNLMDLACATVADMIKGKTPDEIRKTFNNKNDFTPEEEEEGRRENKW

SEQ ID NO: 281839 - protein, 183 aa, Glycine max
  unsure (1)..(183): unsure at all Xaa locations
  Clone ID: PAT_MRT3847_96520C.1.pep
MEESVLTKRPREEEPLENKDSTYELLESLSKRHRSYNHILSLLESEEDDSTQDLSSLITSLQQEITNCASDSDTLLNQHSLTNTTTTTTTNSNLEDCSSSTTKYSSDMMEEHDDKRXVMRHLLEASDDELGIPNKEDESLDLGEDGFKFNGGDMFSSICDGLLWELEDEAANYYDLLQSQLFL

SEQ ID NO: 281840 - protein, 51 aa, Glycine max
  Clone ID: PAT_MRT3847_96521C.1.pep
RNGKTKRGIYLKLGEGKGSNWFKPPLRGIFAYIFPPETIYFSITHENKNMA

SEQ ID NO: 281841 - protein, 64 aa, Glycine max
  Clone ID: PAT_MRT3847_96522C.1.pep
ESRLCTWSTGKRIHKHSVGTPHIKNDNVRPMSQSHEEPQPFLPQLHYYFPNINAGTPFCSLLAA

SEQ ID NO: 281842 - protein, 56 aa, Glycine max
  unsure (1)..(56): unsure at all Xaa locations
  Clone ID: PAT_MRT3847_96523C.1.pep
XLSRISYPKPRHLXTLXRDGGGSCLFCVEPCLFRCLCCWXWCFPXLWLRFFFFXWR

SEQ ID NO: 281843 - protein, 109 aa, Glycine max
  unsure (1)..(109): unsure at all Xaa locations
  Clone ID: PAT_MRT3847_96524C.1.pep
DIEATIHCAEWLSIVGGSSTREQRLRREESLPIFKRRLLGGLLDFAARELQVQTQIIAAAAAGVAAEGLSPKDSXAEAENAAQLSVALVENAIVILMLVEDHLRLQNIQ

SEQ ID NO: 281844 - protein, 72 aa, Glycine max
  Clone ID: PAT_MRT3847_96525C.1.pep
GASQLQTPLGPVGVPSCQIQILGSIMGGIPLRWGPKGTPGKKTGIFIFFSPKKKKTKKKKKKKKKKKKKKKK

SEQ ID NO: 281845 - protein, 55 aa, Glycine max
  Clone ID: PAT_MRT3847_96526C.1.pep
LSTYDMPSQLPVFHHTRDMISYGNVCCTVTYKISFFYQDSIPSVEQVAPSACYPP

SEQ ID NO: 281846 - protein, 40 aa, Glycine max
  Clone ID: PAT_MRT3847_96527C.1.pep
MKLWIFQSPLIYCSSCVTLRTCCMEPSLYLRFGCGSHSTN

SEQ ID NO: 281847 - protein, 67 aa, Glycine max
  Clone ID: PAT_MRT3847_96528C.1.pep
YEQLNEATDNSDHTKDLGDGGYGTAYYGRIHNQTLLDTQHYSSWMVRNYYTLMGPSRSASIHGAELL

SEQ ID NO: 281848 - protein, 82 aa, Glycine max
  Clone ID: PAT_MRT3847_96529C.1.pep
GGVEAKAGEKERGLIVTGGVPPHIYFCGPRWAPPKGFDNAFFFLKGNLEWGIANCWSTQGGIGPPPFKVGVFFPFVNLEKRF

SEQ ID NO: 281849 - protein, 121 aa, Glycine max
  Clone ID: PAT_MRT3847_9652C.1.pep
CQRGIFLFLALIPLFCTSFSPEKPSDRRFLFLLDDFAIISSHSLFFNSLKSCGFVLQFHLSDDPKISLQRYGQYLYDSLILFFPSILRFGGSIDPAAILDFVDFRSLILIRLPAFISTCHS

SEQ ID NO: 281850 - protein, 242 aa, Glycine max
  Clone ID: PAT_MRT3847_96530C.1.pep
MSLLWLVIRQLAEIEAMAASKKLITREEWEKKLSDVKIRKEDMNKLVMNFLVTEGYVEAAEKFRMESGTEPDIDLATITDRMAVKKAVQSGNVEDAIEKVNDLNPEILDTNPQLFFHLQQQRLIELIRNGKVEEALEFAQEELAPRGEENQSFLEELERTVALLAFEDVSNCPVGELLDISQRLKTASEVNAAILTSQSHEKDPKLPSLLKMLLCAQNQLDEKAAYPRVNDLSTATLEDPAV

SEQ ID NO: 281851 - protein, 94 aa, Glycine max
  Clone ID: PAT_MRT3847_96531C.1.pep
PSDTIENVKAKIQDKEGIPPDQQRLIFAGKQLEDGRTLSDYNIQKESTLHLVLRLRGGMQIFVKTLTGKTITLEVEPRDTIENVKAKIQDTEGI

SEQ ID NO: 281852 - protein, 242 aa, Glycine max
  Clone ID: PAT_MRT3847_96532C.1.pep
MSLFLLEIRQLAEIEAMAASKKLITREEWEKKLSDVKIRKEDMNKLVMNFLVTEGYVEAAEKFRMESGTEPDIDLATITDRMAVKKAVQSGNVEDAIEKVNDLNPEILDTNPQLFFHLQQQRLIELIRNGKVEEALEFAQEELAPRGEENQSFLEELERTVALLAFEDVSNCPVGELLDISQRLKTASEVNAAILTSQSHEKDPKLPSLLKMLLCAQNQLDEKAAYPRVNDLSTATLEDPAV

SEQ ID NO: 281853 - protein, 524 aa, Glycine max
  Clone ID: PAT_MRT3847_96533C.1.pep
MELSSSAFVVILLAVAATAVLSNGLDLSFLPSDFLFGIASSSYQYEGAYKSDGKGLSNWDNYTHGPGRSVIMDGSNGDIAIDHYHRYLEDIDLMETLGVNSYRLSLSWARILPKGRFGEPNHAGIEFYNRLIDVLLLKGIQPFVTLSHYDIPQELEDRYGSWLSPQLQEDFAFYADLCFKTFGDRVKYWVTFNEPNFLVSLGYRSGLYPPCRCSGQLAMAKCSEGDSEKEPFVAAHNVILSHAAAVDIYRTKYQTEQKGSIGIVLQHEWFEPMSNSTADKLASERARAFNFNWFLDPIIFGKYPTEMENVLGSLLPKFSSYEKEKLKRGLDFIGVNYYTAFYVQDCMYSACKPGPGISRTEGSYKKSGEKNGVPIGEPTPFSWFNIYPDGMEKTVTYVRDRYNNTPIFLTENGYAEEVDPNFTSEEHLNDFKRIKYMVDHIEALLAAIRKGADVRGYFAWTLIDSFEWIYGYTVRYGFHHVDYATLKRTPRLSASWYKQLLVQYKKTFLLGTSMTGHEKLVQHT

SEQ ID NO: 281854 - protein, 198 aa, Glycine max
  unsure (1)..(198): unsure at all Xaa locations
  Clone ID: PAT_MRT3847_96534C.1.pep
MSLLWLVIRQLAEIEAMAASKKXITREEWEKKLSDVKIRKEDMNKLVMNFLVTXKGYVEAAEKFRMESGTEPXLDLATITDRMAVKKAVQSGNVEDAIEKVNDLNPEILDTNPQLFFHLQQQRLIELIRNGKVEEALTAARRRQKGTQSSLHQGFQVMVFPSLLVLTHYQELIKHFSQTKTFNWEEAWTLVNQTSLVP

SEQ ID NO: 281855 - protein, 234 aa, Glycine max
  Clone ID: PAT_MRT3847_96535C.1.pep
DNYTHGPGRSVIMDGSNGDIAIDHYHRYLEDIDLMETLGVNSYRLSLSWARILPKGRFGEPNHAGIEFYNRLIDVLLLKGIQPFVTLSHYDIPQELEDRYGSWLSPQLHREDFAFYADLCFKTFGDRVKYWVTFNEPNFLVSLGYRSGLYPPCRCSGQLAMAKCSEGDSEKEPFVAAHNVILSHAAAVDIYRTKYQTEQKGSIGIVLQHEWFEPMSNSTADKLASERARAFNFN

SEQ ID NO: 281856 - protein, 113 aa, Glycine max
  Clone ID: PAT_MRT3847_96536C.1.pep
MSELDDQIPTAFDPFADANADDSGAGSKEYVHIRVQQRNGRKSLTTVQGLKKEFSYNKILKDVKKEFCCNGTVVQDPELGQVIQLQGDQRKNVSTFLVQAGIVKKEHIKIHGF

SEQ ID NO: 281857 - protein, 73 aa, Glycine max
  unsure (1)..(73): unsure at all Xaa locations
  Clone ID: PAT_MRT3847_96537C.1.pep
GDIHALVDGEYPRTIQHIVVSILHKFTSAEAKIGKGLIDYGGINQYTTXFIYDPDQSKPKMPCYQMDWNARLA

SEQ ID NO: 281858 - protein, 153 aa, Glycine max
  unsure (1)..(153): unsure at all Xaa locations
  Clone ID: PAT_MRT3847_96538C.1.pep
QPFVGRELFAAGFVSCWAQLNETSQKQLVRNLEMAFSSPNIPPEILATLLNLAEFMEHDEKPLPIXLRLLGALAEKCRAFAKALHYKEMEFEGARSKKMDANPVAVVEALIHINNQLHQHEAAVGILTYAQQHLDFQLKESWYEKLQRWDDAL

SEQ ID NO: 281859 - protein, 156 aa, Glycine max
  Clone ID: PAT_MRT3847_96539C.1.pep
MSHRKFRAPRRGSLAFSPRKRANRLRGKIRSFPKDDQSQAPHLTALLGYKAGMTHIVRELDRLGSKLNKKEIVEPVTIVETPALIVVGVVGYIETPRGLRSLSTVWANFLGEELRRKFYKRWYQSKKKAFTKYTKKVAENPQSVEKELNRIAKYAT

SEQ ID NO: 281860 - protein, 95 aa, Glycine max
  Clone ID: PAT_MRT3847_9653C.1.pep
AKGPQSRGKKTKGGLRTRFCGGPTPPRVIPTPKTPMRFPPRNGALCFSAKNSPPNEIFFPRKIDPQKPCFFLQKKKPLIRVWGGFPRPLICLRKF

SEQ ID NO: 281861 - protein, 60 aa, Glycine max
  Clone ID: PAT_MRT3847_96540C.1.pep
ELNLADSIEEVLLHMDEYVRLHPFESQVFFKTTASELCLVVEQVVCCGSFQQVRWCNLLV

SEQ ID NO: 281862 - protein, 83 aa, Glycine max
  Clone ID: PAT_MRT3847_96541C.1.pep
PQFSDTCTLLTIRLNTQRAHRNENQIKPNPPCTICHHEFMYSFDIKQHYVSHAVLHTMLHIINTYTISLTYLISICIKTLSHS

SEQ ID NO: 281863 - protein, 75 aa, Glycine max
  unsure (1)..(75): unsure at all Xaa locations
  Clone ID: PAT_MRT3847_96542C.1.pep
TDASTLHVAECFVTTPVHCHRNTSVVXAKMERYDMAVDIMRKVSEQYAGTTGIYVGDNQGIANTVIKGWDEHEDT

SEQ ID NO: 281864 - protein, 170 aa, Glycine max
  Clone ID: PAT_MRT3847_96543C.1.pep
MASDGSEEFRLVSPAFKNGGKLPRHYTDDGQGTKKNISPPLEWYNLPEGTKTLALVVEDIDATDSGGPMVPWTHWVVANILATVKGLPEGFSGKSAEMGGDYAAIKEGNNDLKVPGWNGPRLPTPGHRIQFRLYALDDELKLGNKLTKEKLLEDTIEGHVLGEATLMAIF

SEQ ID NO: 281865 - protein, 74 aa, Glycine max
  Clone ID: PAT_MRT3847_96544C.1.pep
TLLLFPPGNRGITYCINNPFNPGDYSPLSSNITDSLKMGTTWYFQFSYHVPVSKIFSFRATSLYLYHGLHVIVS

SEQ ID NO: 281866 - protein, 47 aa, Glycine max
  Clone ID: PAT_MRT3847_96545C.1.pep
RVRISCSGKVNAQDPFPLFRNQLTIVDYDTHGMWIMHIIGCGGKLRK

SEQ ID NO: 281867 - protein, 27 aa, Glycine max
  Clone ID: PAT_MRT3847_96546C.1.pep
VLNDGPLSSVSLVRGTDTNSYLIVRLL

SEQ ID NO: 281868 - protein, 100 aa, Glycine max
  unsure (1)..(100): unsure at all Xaa locations
  Clone ID: PAT_MRT3847_96547C.1.pep
GILPMDYTFGIFDVPRSKGFLILELVEVSAFSLKITFFGLPLILGFCAFLACNFPFPPFCLELLNVPPPKITSRFLSNMEKSYFIFPLGXNNCLYTIVSP

SEQ ID NO: 281869 - protein, 59 aa, Glycine max
  Clone ID: PAT_MRT3847_96548C.1.pep
VTVSQFHLFNGMLLVLVARLVRNQFFGAPLVCLVFHYQTLRACACVTYNSEHIATPPFP

SEQ ID NO: 281870 - protein, 480 aa, Glycine max
  unsure (1)..(480): unsure at all Xaa locations
  Clone ID: PAT_MRT3847_96549C.1.pep
SSFEANPEDAFFNQVVALSRAGLYLLANAKKNTIYAVHIEYGSNPTATRMDYIAEFTVTMPILSLTGTSDSLPDGEHIVQIYCVQTQAIQQYGLNLSQCLPPPLDNVELEKTESHLSRAFDALDGSMETGNMPQVLCGSSESAPVVSVAVNLPSSDISGLPEASISSISDSETKSNDLPPRNGFELVHSASPPLPQSPRLSPKLSGLKNSSNNLETSSTSADHSSEQTNLDSSAEQKVESKKDMADVPGSGDNLRKDDKVVQXDVSVVSNAPTTYKHPTHLVTPSEIFSNAALSSDNSHNSQGMNGQDVAAHRDAENSQVDVEVVGETDSIQENTEYERDRDSHTNVAEKKEKLFYSQASDLGIQMARETYNIEGACQADNIKTINAPDQSGNSVEEEIQDTSKDVPANISESETVAAAVQSPAPSVKGKRQKGKNSHVSGASSTSPSPFNSTDSSXDQGWHSGGSXMEAALPQLFAMQE

SEQ ID NO: 281871 - protein, 141 aa, Glycine max
  unsure (1)..(141): unsure at all Xaa locations
  Clone ID: PAT_MRT3847_9654C.1.pep
TXXTXXTXRLXXHGXDXXXRXXXLSRYXRRXXXVXXXXXTTHXXXSXXXXXXXXPRXXXVXXRXXRHTXXXTXXVXXXXLRXLXXXXXXXDXXXXXLXSXXXXXCXAXXXXSXXXXXXEXRAXXXXXXXRXXXXXXXXXXX

SEQ ID NO: 281872 - protein, 94 aa, Glycine max
  Clone ID: PAT_MRT3847_96550C.1.pep
KKTKGGARAPFFKKSTGFKHHFFVFTPLVAHKVFLQGGSNDAISFTNQETPHMLGLLPARGERKRPIFGHGVPRRLTYWLLGLVNKIRRNGGGW

SEQ ID NO: 281873 - protein, 79 aa, Glycine max
  Clone ID: PAT_MRT3847_96551C.1.pep
MSTSSINGWWLSSISPVKTSLKKATLGPSVFATVSTPSSPSTSSSSTYTSRIQDRHVFAATVHIIIPTVRDDMAKVYDK

SEQ ID NO: 281874 - protein, 163 aa, Glycine max
  unsure (1)..(163): unsure at all Xaa locations
  Clone ID: PAT_MRT3847_96552C.1.pep
MATCVSTIFAPSNTRNSARVLSVGGTNLTWNYPGRACFTKMYDRRNGFSGGIQMSGLLQVKCSANSHSVSPYNNSQGPFLDLHAEVSMLRGEASSTVNSPRKDSSGGDLSESLXTTSSQSDYNEAKIKVIGVGSGGSNAVNRMIESEMHGVEFWIVNTDVQAM

SEQ ID NO: 281875 - protein, 82 aa, Glycine max
  unsure (1)..(82): unsure at all Xaa locations
  Clone ID: PAT_MRT3847_96553C.1.pep
RSKVWCVTQXSIREGWQASVEFFTQSFFTENIQNACLDTLAFSCGPPLMFQFSVQPILXKLVYPPQNNVLVFWGTKLDKHCM

SEQ ID NO: 281876 - protein, 67 aa, Glycine max
  Clone ID: PAT_MRT3847_96554C.1.pep
PRVRTLQQERTHNSPPSGHFLVPVFILQKPLSLTSQKVFPIYKLNPQVLSSSVTQFSVCFFAFNLTP

SEQ ID NO: 281877 - protein, 156 aa, Glycine max
  Clone ID: PAT_MRT3847_96555C.1.pep
EFGTRESLRKWKEQLLGGIDVSAVGENKEPEVKIVSLTIICPGRPDLILPIPFTSDAKKSIFTLKEGSQYQLKFSFTVSNNIVSGLKYTNVVWKTGLRVDNTKKMLGTYSPSQELYTYELEEETTPSGLFARGTYSARTTFVDDDRKCYLDTSYHS

SEQ ID NO: 281878 - protein, 64 aa, Glycine max
  Clone ID: PAT_MRT3847_96556C.1.pep
KKKNKKKKKKKKKKKKKKKKKKKKKKKKKKKKQKKKKKKKKKKKKKKKKKKRPHKKITKLQQHP

SEQ ID NO: 281879 - protein, 111 aa, Glycine max
  Clone ID: PAT_MRT3847_96557C.1.pep
ALHCHPARNQALYITCLDAFHTVITPICTFSGTSTIMPLRPTRAGKLLQTHRPTTCRPVLTFNVTLRRITALLPTTHNTCTTAKLYVLWLVEHKRTYAIRHNTKIPLLVVG

SEQ ID NO: 281880 - protein, 94 aa, Glycine max
  unsure (1)..(94): unsure at all Xaa locations
  Clone ID: PAT_MRT3847_96558C.1.pep
LIEQFQSCFFKFFTPSTMKGTNLLGTRAVYCPFHQFQTTKDADYRHSQLNSVPPSQLLSSLVYLCEYYTVAGLLAEANHLLSCKEKNNXSISNR

SEQ ID NO: 281881 - protein, 63 aa, Glycine max
  Clone ID: PAT_MRT3847_96559C.1.pep
WILLWRFLSVSIGKSPLPVLSGPIRKSLLVKKLQIFMYRCYFYICPLKMLFKMEGLMKNPCCL

SEQ ID NO: 281882 - protein, 123 aa, Glycine max
  Clone ID: PAT_MRT3847_9655C.1.pep
RTLKLSRSRSCIASIMRNLSSDWFEDEDVIQNTPPMGNEKAFPGRPEGFPKNIYALNYNANAERLSCNGHGNSVQNSSVHDVQNVKSSTNKEREGNGPLAPKGKETENLNRLSLLADHEGSGT

SEQ ID NO: 281883 - protein, 232 aa, Glycine max
  Clone ID: PAT_MRT3847_96560C.1.pep
MRLSCNGCRVLRRGCTTECPIRISLQWINSPNSQSNATLFLAKFYGRQGLLTLLTNAPSQLQQAVLKSLLYEACGRIVNPVLGSTGLLSTGNWHLCEAAVKAVLNGAPIEQAPLDGATSLQLKACNIRHVAKSDKSCGSDTLRKVKSRTTTFKRRAAKSRVESVVAELAESELDGHGSMSHDSGSGVTRMSENKIVGGEADSDSVQSVGPARADGEEMELQLTLGWGPLKRQ

SEQ ID NO: 281884 - protein, 60 aa, Glycine max
  Clone ID: PAT_MRT3847_96561C.1.pep
ETDILQISMLIWKRQHANQEISIYARTTVIWKRHTCDKECDAHITYILLNDMTARVQVAS

SEQ ID NO: 281885 - protein, 85 aa, Glycine max
  Clone ID: PAT_MRT3847_96562C.1.pep
FPAPCCESPRCACPPLGSAPSPRVPPTYFPHFLRVFKGVFSICLIKGAPKVVFDYTFLPGVVLAFSFQAFVSPLQCYGKDRGLLD

SEQ ID NO: 281886 - protein, 305 aa, Glycine max
  Clone ID: PAT_MRT3847_96563C.1.pep
MAADDGVKPPTLEFLSICKSLLAGGVAGGVSRTAVAPLERLKILLQVQNRQDIKYNGTIQGLKYIWKTEGFRGMFKGNGTNCARIVPNSAVKFFSYEQASMGILWLYQRQPGNEEAQLTPILRLGAGACAGIIAMSATYPMDMVRGRLTVQTEASPCQYRGIFHALSTVFREEGPRALYKGWLPSVIGVIPYVGLNFSVYESLKDWLIRSKPFGIAQDSELSVTTRLACGAAAGTVGQTVAYPLDVIRRRMQMVGWKDAAASVVAGEGKSKIEYTGMVDAFRKTVQHEGFGALYKGLVPNSVKVS

SEQ ID NO: 281887 - protein, 230 aa, Glycine max
  unsure (1)..(230): unsure at all Xaa locations
  Clone ID: PAT_MRT3847_96564C.1.pep
QVLSCFLWSVHQAESLSYYENVRKRENQLVKQAVLANLAYVELELDNPVKALSVAKSLLELPECSRIYIFLGHVYAAEALCLLNRPKEAAEHLSFYLSGGNNVDLPFSLEDCEKWQPERTADFDEVNGGSTTAKNSSLEGTQSIVGFKPEEDQIKLGAIRAVGGRSXGCWDKSNMATGQAWSILRNSPGAPLTAVYVDLMLGKPQVAQAKLKRCSRIRFLPSGITLNKSS

SEQ ID NO: 281888 - protein, 331 aa, Glycine max
  unsure (1)..(331): unsure at all Xaa locations
  Clone ID: PAT_MRT3847_96565C.1.pep
MEEENVKQPLLERKYHENCPGCKVDQAKELSEGKGVPVTNLFIIWMVVLCAALPISSLFPFLYFMVRDFNIAKTEADISSYAGYVVXIFNTLFGLSTSFWMAVIMRFLLGSLNGLLGPVKAYATELFREEHQALGLSTXAWGIGLIIGPALGGYLAQPVEKYPHIFPKDSFWDKFPYFLPNFIISAVAFVVVIGCIWIPEXLHNHNCRNESIDNAEALENGGSVASKDKIIQKKENLLLNWPLMSSVIVYCVFALHDIAYQEVFSLWAVSPQRLGGLNFTTDDVGNVLSISGLALIIYQLTIYPSVEKASGPIVIGRISGMISIPLLLRNT

SEQ ID NO: 281889 - protein, 53 aa, Glycine max
  Clone ID: PAT_MRT3847_96566C.1.pep
ISFFFYSFNQVFFTFCLASIHDIKMNFLFTRVYLFLYLRVTFLATSLLESNRL

SEQ ID NO: 281890 - protein, 143 aa, Glycine max
  Clone ID: PAT_MRT3847_96567C.1.pep
MEENVKQPLLERKYYEDCPGCKVDQAKELSEGQGVPVRNLFIIWMVVLCAALPISSLFPFLYFMVRDFNIAKTEADISSYAGYVGSAFMFGRCLTSVMWGIVADRYGRKPVIVIGIIVVVIFNTLFGLSTSFWMAVIMRFLLG

SEQ ID NO: 281891 - protein, 66 aa, Glycine max
  Clone ID: PAT_MRT3847_96568C.1.pep
CEKTTEGINPYVVSCSVFFVRQSISFAYFFLKDLYVIYVPLGVPLCYFVHIHLLHLSSVISFFCEV

SEQ ID NO: 281892 - protein, 180 aa, Glycine max
  unsure (1)..(180): unsure at all Xaa locations
  Clone ID: PAT_MRT3847_96569C.1.pep
ARASSSTLRDNDDDDDDGEEKEEPTKEKVDLQFFVKGIEVGRRDAAALFFLVSFLSAVYGWVILVFLVTYSWVLGVVFVSVVNDLLGRFSSVTVLVWEGSRLGLKRLSGFILMRWAVRDALTQLLGLWYFGEVEDQYSFFKLFVRLKLMPFSVMSPRVRGFEREIXGFLFTWFLVDPFVA

SEQ ID NO: 281893 - protein, 42 aa, Glycine max
  Clone ID: PAT_MRT3847_9656C.1.pep
CGFFFFFFFCAQANHYFIFLRRAHAQPNGIHHRSFLVHFLKT

SEQ ID NO: 281894 - protein, 44 aa, Glycine max
  Clone ID: PAT_MRT3847_96570C.1.pep
IKVLYFTQGIWLYRLNMIRVSSFNLLIFDSIVEIVRLAPLMIEL

SEQ ID NO: 281895 - protein, 36 aa, Glycine max
  unsure (1)..(36): unsure at all Xaa locations
  Clone ID: PAT_MRT3847_96571C.1.pep
NLXRQEPDPXEAXRVXRRIFSXHHLHFXSSALLLSD

SEQ ID NO: 281896 - protein, 81 aa, Glycine max
  unsure (1)..(81): unsure at all Xaa locations
  Clone ID: PAT_MRT3847_96572C.1.pep
LHLXSXXYGXFXILGGPXSEGXFKXFGEGVHXMKXKGTKXXSCQGXXNQPSYPPXXNGPWFGPIGLPGVRATDXSVVAIXC

SEQ ID NO: 281897 - protein, 47 aa, Glycine max
  Clone ID: PAT_MRT3847_96573C.1.pep
IAMTHIKVSSYSAHLPLLTILCKQCVVIRNRILLCAVTWVEYDLSCS

SEQ ID NO: 281898 - protein, 107 aa, Glycine max
  Clone ID: PAT_MRT3847_96574C.1.pep
NSEPVPKGGPILQKKKPLKIGPKNEKRSLQRKKGFPKRSQKKKKPEEKKKNPGGKKRGANQLKKGSAKRPFKRGKTFGTKGVKKYSNPGGKGVFFIWPKGGVFFQKG

SEQ ID NO: 281899 - protein, 160 aa, Glycine max
  unsure (1)..(160): unsure at all Xaa locations
  Clone ID: PAT_MRT3847_96575C.1.pep
PDRNSRVGRRVRTLVTSPLLVLLGIAGKNSKARFQATVGTTKYPXEIPPLPWYRGTIPQMAMAGFLPFSAIYIELYYIFASVWGHKIYTIYSILFIVFIILLIVTAFITVALTYFQLAAEDHEWWWRSFLCGGSTGLFIYAYCLYYYYARSDMSGFMQTS

SEQ ID NO: 281900 - protein, 258 aa, Glycine max
  Clone ID: PAT_MRT3847_96576C.1.pep
RLREDDRRGLSIFSFGHNHFGREREMAYNKGVHSSSGGSHRGRPYVLVLLITFGIALLGVMVLHKLRERRICTLLVKEEDQQILALQLLLQKERDRSKELRGKNEEMKGKLYTLRSQKMELARTVVEMQSTLDSLKDEQKLMESEFEEQQNELRLMQEKGKSVGQGRSEIEALRDNLKHKEAEMEDLKRRLEIPVNDHPTIFPEIVTANGTIAAQDENGKDEISGESAKHEGDTDNNEGTIKSELTKFKDEDVMPLVE

SEQ ID NO: 281901 - protein, 388 aa, Glycine max
  Clone ID: PAT_MRT3847_96577C.1.pep
MGSSNEGSSSSTLTSGRSWSNHVFLSFRGDDTRKGFTGHLFASLERRGIKTFKDDHDLQRGKLISVELMKAIEGSMLALIILSPNYASSTWCLDELKKILECKKEVFPIFHGVDPSDVRHQRGSFAKAFSEHEEKFREDKKKLERWRHALREVASYSGWDSKEQHEATLIETIVGHIQKKIIPRLPCCTDNLVGIDSRMKEVYSLMGISLNDVRFIGLWGMGGVGKTTIARFVYEAIKGDFNVSCFLENIREASKTNGLVHIQKELLFHLNVRSSDFYNLHDGKNIIANSLSNKKILLVLDDVSELSQLENLAGKQEWFGSGSRVIITTRDKHLLKTHGVHLTCKAKALAQNEALKLFCLKAFKQDQPKEEYLDLCKEVVEYARGLPL

SEQ ID NO: 281902 - protein, 558 aa, Glycine max
  Clone ID: PAT_MRT3847_96579C.1.pep
MSSDASRERGASTVVGLKFQYRALLFLAYQSLGFMFGDLTLSPLYVYQSIFSGRLKNVQHEDAIFGAFSLIFWTLSIISLLKYAIIMLSADDNGEGGIVALYSHLCRNAKFCLLPNHQASDEELSTYHKPGSSNRNIPPSPLKRFIEKHKSTKTVLLIFVLLGACMIICVGALMPAISVRSSVEGLKIEAKITNKSMVSLISCVLLIGLFVMQHRGSYKVAFVFPPIIILWLLTIFMIGIYNVIKWNPRVYQALSPYYTYKFFRLTGKDGWTNLGGVFLCVTGTDAMFADLGYYRQTPVRVAFFCIIYPCLVLQYMGQAAFLSKNLSAVPISFYASIPDILFWPVFVVAALAVIVASQAVIASTFSIVQQCHAFECFPRVKAVHSRRWIPGQTYIPEINWILMIISLAATVGLGDMSNIGYAYGMAYLIVVFVTTCLTSLVINLVWNQSLIVALAFALFFGAIEILFLSSYCMKILKGSWIPLVLSAVFMVVMYVWHYGSRKKYLFDMLNKVSMRSIITLGPSLGIVRVPGLGLIYTELATGVPASSTHFLTNLPAFY

SEQ ID NO: 281903 - protein, 19 aa, Glycine max
  Clone ID: PAT_MRT3847_9657C.1.pep
SNTTYTLKSKSHIFKTNIH

SEQ ID NO: 281904 - protein, 174 aa, Glycine max
  Clone ID: PAT_MRT3847_96580C.1.pep
EELDRIEEFLKWVSYIFEDGSTYEGTVWDDYAHGKGVYVSDDALVRYEGEWFQNDVEGHGVVEVDIPVIEPAPGSKLEAKMRAQGKIIARDFLSPEDREWLEKDIEDMYYLADGNYEIPFYENEEWVRQFGRKPEKGRYRYAGQWKHGRMHGCGVYEVNERILYGRFYFGEYVD

SEQ ID NO: 281905 - protein, 75 aa, Glycine max
  unsure (1)..(75): unsure at all Xaa locations
  Clone ID: PAT_MRT3847_96581C.1.pep
TYLYCPQPHVTHIKPIAFSXFRSHAKNHRPFPYSLLQRQLLCHYQMLPLHEQLXISHQIATPRSQILPNLNNLSL

SEQ ID NO: 281906 - protein, 61 aa, Glycine max
  Clone ID: PAT_MRT3847_96582C.1.pep
GYSSYDQECQSFGLRVIALVLSRVKDQLVRCYRSLIQISSREGSVLTFIDYINVVRCKRNV

SEQ ID NO: 281907 - protein, 160 aa, Glycine max
  Clone ID: PAT_MRT3847_96583C.1.pep
LLLENIDYALDTFLIYMLTLSIFPGFLLEDTGSHSLGTWYALVLIAMYNVWDLIGRYIPLLKCLKLESRKLITITILSRFLLVPAFYFTAKYGDQGWMIVLTSFLGLSNGYLTVCVLTSAPKGYKGPEQNALGNLLVLFLLGGIFAGVTLDWLWLIGKVW

SEQ ID NO: 281908 - protein, 62 aa, Glycine max
  Clone ID: PAT_MRT3847_96584C.1.pep
ETMTLGMVAVETARNGKIRAVCWVVDPKALVVRRQSHTAQGWKVIPESHTPIAVGVRGTCQG

SEQ ID NO: 281909 - protein, 73 aa, Glycine max
  Clone ID: PAT_MRT3847_96585C.1.pep
FVSPLYCQALQYCFSTWGIVSYSFLLYSILDWWLSMLLYLLKYTSSRCYLLRQCLKSSLISFTLIGWIRLVAH

SEQ ID NO: 281910 - protein, 66 aa, Glycine max
  Clone ID: PAT_MRT3847_96586C.1.pep
SRGRRFCVHWLLQVRLLQSMPVQVNLPRVVRISELNAQAETNYAVGLGSSDYSYNVLTAFGREKCN

SEQ ID NO: 281911 - protein, 107 aa, Glycine max
  Clone ID: PAT_MRT3847_96587C.1.pep
ETNPPPIGGRGRFGKKGVSITFVPPDDAQKLFEIPRFSNGAGGEPPPKGGGFPGRGNFWSRVRPRGLFFLGKENWVPFFPQKFSPLGDQTMGSEAIGIGPYKIGLTH

SEQ ID NO: 281912 - protein, 65 aa, Glycine max
  Clone ID: PAT_MRT3847_96588C.1.pep
AVRSAMLQQRGFYMLPVRVKVVYTSSVSLALAECSLSGWRMIIGQGKISVFKIALLSMPRFEPYM

SEQ ID NO: 281913 - protein, 225 aa, Glycine max
  Clone ID: PAT_MRT3847_96589C.1.pep
VADFSASVKKPHTLLQRVKACTTEEDQEKLMQITSLHSLNAFLLPIKTVGVQGDCRSYSYVCGISSKDEPDWESLIFLARLIPRMCHNINRVVYIFGPPVKEPPTDVTPTFLTTGVLSTLRQADFEAHNILRESGFAGKISQMPVILTPLHFDRDPLQKQPSCQRSVVIRTFITSDFMTGVPATPGNEIPVEVVLKMVTEIKKIPGISRIMYDLTSKPPGTTEWE

SEQ ID NO: 281914 - protein, 381 aa, Glycine max
  Clone ID: PAT_MRT3847_9658C.1.pep
MLKFHIHRILVCAKGFTFTTLKWNPIVQLQFLKFEFCTTSRSFVVPYLINNCGFSQENALKASLRLRFRGPQKPDSVLSFFRSHGFSNSQICHILQKAPRLLLCNTQKTLLPKFQYLLSKGVSSLDIVRMVTPAPRFLERSLENHIIPTCEFVRGFLQSDKRMIHLLIRSPKLLNESSVTPNIKLLLDNGVTHSSIALLLQRRNQLLWSANLLKTVEELKQMGFDPSTSTFSMALLAKRTVGKTKWAEKIDTFKKWGWSQEQVLLAFRRQPQCMLSSRDKINAVMSFWVEQVGFNSAEIVKAPGIFLFSLQKRIAPRALVVQFLISKSLLQKEASLTTPFILPEKLFLKKYVKHFKEDSSHLLKLYEEKMSLENDRGNPCS

SEQ ID NO: 281915 - protein, 82 aa, Glycine max
  Clone ID: PAT_MRT3847_96590C.1.pep
MLDEYIFISSYHQVKYTILISFSFLLFPNGLCRHFTKKILFLATTNLEIVHICKQLVLITLSMHQVDRWNEQRENGTFPGPL

SEQ ID NO: 281916 - protein, 151 aa, Glycine max
  Clone ID: PAT_MRT3847_96591C.1.pep
MGSEEEKGEFYLRYYVGHKGKFGHEFLEFEFRPDGKLRYANNSNYKNDTIIRKEVYLNPAVLRECRRIIAESEIMKEDDNNWPEPDRVGRQELEIVMGNEHISFTTSEIGSLVDVQSSADPDGLRIFYYLVQDLKCFVFSLISLHFKIKPI

SEQ ID NO: 281917 - protein, 75 aa, Glycine max
  unsure (1)..(75): unsure at all Xaa locations
  Clone ID: PAT_MRT3847_96592C.1.pep
MAASVFTVGAVNRALLNLNGSGAGAXLPANPYFGTSLNKVIASRVPNSKVSVGSFNIVAVEEKKEIEYTLHTDYG

SEQ ID NO: 281918 - protein, 107 aa, Glycine max
  unsure (1)..(107): unsure at all Xaa locations
  Clone ID: PAT_MRT3847_96593C.1.pep
SLYLWHLFIIHLSLTKLWTVNIVQYKALPSLPEXFGSVLGRQVIKNKKLWGSIESLETLQPNANTRSNYSVPKQQSNGFLYAKVFGGFSKXRSSIPDLVAISRLLML

SEQ ID NO: 281919 - protein, 121 aa, Glycine max
  Clone ID: PAT_MRT3847_96594C.1.pep
MPFLTKIKWVVLSVVTLSLASIIIHLSLTKLWTVNIVQYKALPSLPEEFGSVLGRQVIKNKKLWGSIESLETLQPNANTRSNYSVPKQQSNGFLMPKLFGGFSKRASSIPGFVLSAYGYST

SEQ ID NO: 281920 - protein, 358 aa, Glycine max
  Clone ID: PAT_MRT3847_96595C.1.pep
MGEGVVSCRLQLFFFLLHGLLLSKVRGKGSSSALDYAQCDVFTGTWVVDESYPPYDPATCPFIEREFRCKGNGRPDLLYTRYRWHPLACNLLRFNGLDFLEKMRGKSIMFVGDSLSRNQWQSLTCLLHSAVPNSPYTLDRVGDVSIFTLTEYRVKVMLDRNVYLVDVVREDIGRVLKLDSIQGSKLWQGIDMLIFNTWHWWYRRGPTQPWDFVELGGHTYKDIDRMRAFEIALKTWGAWVDANVDPTRVKVFFQGISPSHYNGSLWNEPSATSCIRQKTPVPGSTYPGGLPPAVAVLKSVLSTIRKPVTLLDITTLSLLRKDGHPSIYGLNGAAGMDCSHWCLPGVPDTWNEILYNLI

SEQ ID NO: 281921 - protein, 123 aa, Glycine max
  Clone ID: PAT_MRT3847_96596C.1.pep
WGAWVDANVDPTRVKVFFQGISPSHYNGSLWNEPSATSCIRQKTPVPGSTYPGGLPPAVAVLKSVLSTIRKPVTLLDITTLSLLRKDGHPSIYGLNGAAGMDCSHWCLPGVPDTWNEILYNLI

SEQ ID NO: 281922 - protein, 68 aa, Glycine max
  Clone ID: PAT_MRT3847_96597C.1.pep
RFAAYHPLRRCLLVTELALSFCIFSLSFFSWCNESYYFLIPPYPFVVSRFHQFLLAFSYRLPFPFYFT

SEQ ID NO: 281923 - protein, 59 aa, Glycine max
  Clone ID: PAT_MRT3847_96598C.1.pep
GEFDTFTNVYCLHRDVKSLTFSLCYLPFPIPYMRMANSHPQHTSGQLSDCRAGRTINNF

SEQ ID NO: 281924 - protein, 98 aa, Glycine max
  Clone ID: PAT_MRT3847_96599C.1.pep
QGEDFFLERKAFGSSPCRGALPSPKCSFFFSVPALFRRQGILSSAFLGVWTVGLFFFFLAGFFSCMGSVFFGKLFVFFRPCLFFSQFRLCLRLWCKAT

SEQ ID NO: 281925 - protein, 115 aa, Glycine max
  unsure (1)..(115): unsure at all Xaa locations
  Clone ID: PAT_MRT3847_9659C.1.pep
QAKSAVSNSLWDAKVDTFKRWDWSEDEVFIAFRNQPNVMLYSXKTHYSLEKRVVLRGLVVQHLLSNGLIKKSSSLVTLFSKSDKVFLQKYVRCFWDRELTSMWLLWFNLWMLILV

SEQ ID NO: 281926 - protein, 93 aa, Glycine max
  Clone ID: PAT_MRT3847_965C.1.pep
MCFLGYACTQMVFPVLNSLSCRGFFSENANPKILSPLGPTLSKGQKPRDRKSSAPPGGGGTPKTEAVFAPGGGLLFLFPLGQKTMGGEDHLGA

SEQ ID NO: 281927 - protein, 351 aa, Glycine max
  Clone ID: PAT_MRT3847_96600C.1.pep
MRPMQLPPPSGSGANPAPTNNSKDRPQRRRKDLTLPLPQRDTNLAVPLPLPPSTASAAAAQQVIPFSELERLNRIGSGSGGTVYKVVHRTSGRVYALKVIYGHHEESVRRQIHREIQILRDVNDPNVVKCHEMYDQNSEIQVLLEFMDGGSLEGKHIPQEQQLADLSRQILRGLAYLHRRHIVHRDIKPSNLLINSRKQVKIADFGVGRILNQTMDPCNSSVGTIAYMSPERINTDINDGQYDAYAGDIWSFGVSILEFYMGRFPFAVGRQGDWASLMCAICMSQPPEAPPSASPHFKDFILRCLQRDPSRRWSASRLLEHPFIAPPLPNHNQTPPNLHQLLPPPPRPLPS

SEQ ID NO: 281928 - protein, 54 aa, Glycine max
  Clone ID: PAT_MRT3847_96601C.1.pep
LLRGSKIKWAISGRILIWAGAPLFVIKKGFRVPFAFGHLIFLKGPQRTGKDLPP

SEQ ID NO: 281929 - protein, 73 aa, Glycine max
  Clone ID: PAT_MRT3847_96602C.1.pep
NRKQKQSLLDSKNLSIPYYFFVYDCLRERKSLSVLATDFVNHNLFHILVYLLNTLLFDIGLRVRFKLLLLLFQ

SEQ ID NO: 281930 - protein, 76 aa, Glycine max
  Clone ID: PAT_MRT3847_96603C.1.pep
LGFSALFVLQLTFLFKKKAMLNKGVHTRRLIYDSIQSNTNFNYINWEKYVFNNVKSNLVPAVSLQCIHDPHNIQQY

SEQ ID NO: 281931 - protein, 41 aa, Glycine max
  Clone ID: PAT_MRT3847_96604C.1.pep
SKIIVHKLRDFKMKFDGNIISSLAIVTPQRHVKIRPYQTTP

SEQ ID NO: 281932 - protein, 248 aa, Glycine max
  unsure (1)..(248): unsure at all Xaa locations
  Clone ID: PAT_MRT3847_96605C.1.pep
MSSRVWFLLFLLLISKCHQVWGSYAGSASSIVNPSKVKQISWKPRAFVYEGFLTDLECDHLISLAKSELKRSAVADNLSGESQLIDVRTSSGMFISNNKGPIVAGIDDHISSWTFLRRENGXFPSAEEPPRRRGTETSSDLSECAKKGIAVKPRRGDALLFFSLHTNATPDTSSLHAGCPVIEGEKWSATKWIHVDSFDKTVGAGGDCSDNHVSCERWASLGECTKNPEYMIGSSDIPGYCRKSCKAC

SEQ ID NO: 281933 - protein, 310 aa, Glycine max
  unsure (1)..(310): unsure at all Xaa locations
  Clone ID: PAT_MRT3847_96606C.1.pep
MNRVWFLLFLLLISKCDHVWSSYAGSASSVINPSKVKQISWKPRAFVYEGFLTDLECDHLISLAKSELKRSAVADNLSGESQLSDVRTSSGMFISKNKDPIVAGIEDKISSWTFLPKENGEDIQVLRYEHGQKYDPHYDYFTDKVNIARRGHRIATVLMYLTDVAKGGETVFPSAEEPPRRRGAETSSDLSECAKKGIAVVLFILPGIAFAXVKPRRGDALLFFSLHTNATPDTSSLHAGCPVIEGEKWSPTKWIHVDSFDKTVGAGGDCSDNHVSCEKWASLGECPKNPEYMIGSSDIPGYCRKSCKAC

SEQ ID NO: 281934 - protein, 80 aa, Glycine max
  Clone ID: PAT_MRT3847_96607C.1.pep
GPPFRLILKKFVTSKNKKIVNFLGGNMTKFINFHLIVNISTIIITILFSQHHFGFFFSPTTTGGKKHLVPKHFRGFFAKP

SEQ ID NO: 281935 - protein, 26 aa, Glycine max
  Clone ID: PAT_MRT3847_96608C.1.pep
CFSFIEIVIILKHEDLPLFLVCELLL

SEQ ID NO: 281936 - protein, 43 aa, Glycine max
  Clone ID: PAT_MRT3847_96609C.1.pep
RTIQRKRGQYVSPVIHNAYFIKDQDNIKQVHMDHQSYIIHKLY

SEQ ID NO: 281937 - protein, 86 aa, Glycine max
  unsure (1)..(86): unsure at all Xaa locations
  Clone ID: PAT_MRT3847_9660C.1.pep
TNPEIYNSSFTIQANMNPVIPCSIGNVSIIPGFTYSTRKNNTLTRLNLSRSTVKPGSSSWRFLLPSFVASGAFPXNKRILSFHKKS

SEQ ID NO: 281938 - protein, 140 aa, Glycine max
  Clone ID: PAT_MRT3847_96610C.1.pep
RAHACVGLRLEVKLAKITLSSTWAFEDFKSALSKAIRTPPISDFNLKLVFDELLERAKEKEEKEAKKRKRLSDDFFHLLHSTKDITVSLKWEDCRPHVEDSQEFRSIGDESLCKEVFEEYIAQLKEEAKESERKRKEEKG

SEQ ID NO: 281939 - protein, 192 aa, Glycine max
  Clone ID: PAT_MRT3847_96611C.1.pep
MKRIDMFCASQASTAICLSMEQASCSSSNSILLGGRTMDRHNPIINDSRRSTSKSLTAPCSSSQSPINPKPYHELHKAKKNSSSKNAAKGHDNHHQKKSTAEKLTEHVTNTSKPVDGIVRRGWLKPPANLITPPGSTRSLLSDTALLDGSSDFDPVLALTTTVNNKTSQVGHQDEANPVSKLSSSSHPKSGS

SEQ ID NO: 281940 - protein, 69 aa, Glycine max
  Clone ID: PAT_MRT3847_96612C.1.pep
IFTGLNWKRIVNLDPWKIKNQKLKTLFKVPSGKRMGKPYLGGGKNLPYPPKKQREANYLQKREFGSSAL

SEQ ID NO: 281941 - protein, 54 aa, Glycine max
  Clone ID: PAT_MRT3847_96613C.1.pep
HLIHQNSQTPVRIEDVGCQETASPLWFKSLVNLYKSLVNLYKYYEFNSYALLFN

SEQ ID NO: 281942 - protein, 243 aa, Glycine max
  Clone ID: PAT_MRT3847_96614C.1.pep
RNTRRPRVRPGCEECRKAKRQKLSEERSSFVQAPSPILSDDEDTWWVKKGLKSSEHLKVDQPLKPTKQVTKTRQKTVRKTQSLAQLAASRIEGSQGASTSHVCGNKVSCPHHRTAMDGDTTRSGDGIRSGHCEDIGSIGRALKQLRFVERKEVTLWLMTVVRQLIEESEKNVGKVSQFGRPFATVDDKSSIRWKLGEDELSALLYLMDVSDDLVSVVKFLLWVLPKVYSSPNSTIHSGRNALM

SEQ ID NO: 281943 - protein, 132 aa, Glycine max
  Clone ID: PAT_MRT3847_96615C.1.pep
MSFPTSNTTTRSSSPTTTSETPTTLSKPRILCLHGGGVNSEVFRMQCRSLIKHLPAFRFVFADGPWFCEAGPGIVPVYEDCGPFRRWLRWLPHQPETDDESATEEIFYEIERCKREDDDKGATGEWVCILGF

SEQ ID NO: 281944 - protein, 65 aa, Glycine max
  Clone ID: PAT_MRT3847_96616C.1.pep
GGVVLCDNGGADGGFLPRVDPKVGFSYAEHRRRITNRGGVSVGFQEPCLVDGLDGGDFLKSGGVK

SEQ ID NO: 281945 - protein, 81 aa, Glycine max
  unsure (1)..(81): unsure at all Xaa locations
  Clone ID: PAT_MRT3847_96617C.1.pep
WCPWCNPGCAKILRQSPPSPIXMGIGIPFYGFYFTKVXRYFEVVYAXRXWXFFYLXXMFFSLGXXWXGGKLWEGEFLVELI

SEQ ID NO: 281946 - protein, 175 aa, Glycine max
  Clone ID: PAT_MRT3847_96618C.1.pep
MPGGSRNPLVVGRVIGEVIDPFEISIPFRVTYGNREVGNGCELKPSQVANQPRVSVGGDDLRNFYTMVLVDPDAPSPSNPNFREYLHWLVTDIPETTGPNFGNEVVSYESPRPTMGIHRLVFVLFRQQFRQRVYAPGWRQNFNTREFAELYNLGLPVAAVFFNCQRESGSGGRTF

SEQ ID NO: 281947 - protein, 86 aa, Glycine max
  Clone ID: PAT_MRT3847_96619C.1.pep
MVEVLEALRKIQSGNYESENLEKGDDVGGGGVTSSTSSTEQVHVLQPPPASPDWGQAGISKNKLPASPMSLTEKRESESTTPNVSG

SEQ ID NO: 281948 - protein, 309 aa, Glycine max
  Clone ID: PAT_MRT3847_9661C.1.pep
MSPFFSHHPLSPQRFFIFLLILAFRGVRVSATTFTFVNKCDHTVWPGILGKPDIGTTGFELKRGSTRTFDGPPGWSGRFWGRTGCQFDQSGQGTCATGDCGSGQVTCNGAGATPPATLAEFTLGEGAPDYYDVSLVDGYNLPMMVDASGGSGACAATGCGADLNRRCPAELRVDGGDACQSACRAFGKPEFCCSGAFNSPAACAPSMYSQIFKAACPKSYSYAFDDATSTFTCTAADYTVTFCPFSSPSLKSLMESGPGSSVEQAAVATTSWIANLATGDSTRSRSQPFSASNSAFFVAVTLILSYLVS

SEQ ID NO: 281949 - protein, 45 aa, Glycine max
  Clone ID: PAT_MRT3847_96620C.1.pep
SEQMLLCYISTVSLVLLILRVCAFFSILCLGTCLGKYKMLTDSFC

SEQ ID NO: 281950 - protein, 41 aa, Glycine max
  Clone ID: PAT_MRT3847_96621C.1.pep
WLSTRVGFFSSFYVMLMDEDALCYAALSCVLLHVCSLTPIP

SEQ ID NO: 281951 - protein, 48 aa, Glycine max
  Clone ID: PAT_MRT3847_96622C.1.pep
VYRNHAVINSSWLFCLCVNDWDAATNFPKVTVMRETLFESVPVIYTMC

SEQ ID NO: 281952 - protein, 64 aa, Glycine max
  unsure (1)..(64): unsure at all Xaa locations
  Clone ID: PAT_MRT3847_96623C.1.pep
GYYPDRRLGSLLFLPXXILFNYRNWCAIFWNLGSVIFSGSCVFSYLVXXGSCGLDFKGSAIAGQ

SEQ ID NO: 281953 - protein, 110 aa, Glycine max
  unsure (1)..(110): unsure at all Xaa locations
  Clone ID: PAT_MRT3847_96624C.1.pep
MVAIGNMMEKKIXMPAHLMYDGDDPRLFEHYSAVAQRIGVYTANDYADILEFLVERWRLEKLEGLMAEGKRAQDFVCGLAPRIRRLQERADERARKMKKHHGVKWHFEYE

SEQ ID NO: 281954 - protein, 386 aa, Glycine max
  Clone ID: PAT_MRT3847_96625C.1.pep
MQIRTCHSITTQTLPQLPCSSRKAHHRHLLPPLNAAVSAAPFKARKAHSMPPEKKEIFKSLEGWASEWVLPLLKPVEQCWQPQNFLPDPSLPHEEFSHQVKELRERTKELPDEYFVVLVGDMVTEDALPTYQTMINNLDGVKDDSGTSPSPWAVWTRAWTAEENRHGDLLRTYLYLSGRVDMAKVEKTVHYLISAGMDPGTDNNPYLGFVYTSFQERATFVAHGNTARLAKEGGDPVLARLCGTIAADEKRHENAYSRIVEKLLEVDPTGAMVAIGNMMEKKITMPAHLMYDGDDPRLFEHYSAVAQRIGVYTANDYADILEFLVERWRLEKLEGLMAEGKRAQDFVCGLAPRIRRLQERADERARKMKKHHGVKFSWIFNKELLL

SEQ ID NO: 281955 - protein, 76 aa, Glycine max
  Clone ID: PAT_MRT3847_96626C.1.pep
LLTLKSHYYSIYTPYLIDFYFEEGHLSKRFFLSREEIDHNDKPYSVGVEKTPRGPTGLCFDEVKTKHTTIIAASTN

SEQ ID NO: 281956 - protein, 287 aa, Glycine max
  Clone ID: PAT_MRT3847_96627C.1.pep
RRRPHRKEINCIDTVFEKMKNLRILIVRNTSFSHEPRYLPKNLRLLDWKNYPSKSLPSEFNPTKISAFNGSPQLLLEKPFQFDHLTYMNISGCDKVSEFPDVSRAMNLRKLILDGCENLVSIHKSVGHLANLVSLSASNCTQLHSFVPTIYLPSLESLSFVLCTTLAHFPDIEGKMDKPLEIVMSYTAIQKLPDSIKELNGLTYLEMTGCEELRYLPSSLFKLPNLVTLKLAECAFLPRSLRMFIGSPSTCAKLETLHFDNTGLTDYDLKTIVAIFPNLKDLNVSRN

SEQ ID NO: 281957 - protein, 51 aa, Glycine max
  Clone ID: PAT_MRT3847_96628C.1.pep
IVVGMSANGEVFRTIRVVVVVEPGRVHVGDGRRNRARSSLLWLDTVSSVGP

SEQ ID NO: 281958 - protein, 146 aa, Glycine max
  unsure (1)..(146): unsure at all Xaa locations
  Clone ID: PAT_MRT3847_96629C.1.pep
FIDAINHGRAIRGHKIRRSSPIKSLKKLKIKSLRHLNKYTPFDSFGYSDFDSYGYSNFDDSYGSPSSLPLPPFNSLAPHPQPTPSSSIAPPNLAPPSIGGNSSLPALSPVPSSPHGAVFGPPNPRSMPPPXYPLSPPKHAPSLSPP

SEQ ID NO: 281959 - protein, 69 aa, Glycine max
  Clone ID: PAT_MRT3847_9662C.1.pep
VESGSRIHSNIHCKHTVSQGPHYHVTDSEVTALGVEPTVATVIVEYTSIKTCEKDKNVRFGKDVVIAHS

SEQ ID NO: 281960 - protein, 45 aa, Glycine max
  Clone ID: PAT_MRT3847_96630C.1.pep
IKYEYLFLLLVTFKIMKRKFTQLRESMGFQTSHSTKRIPQPIFRA

SEQ ID NO: 281961 - protein, 98 aa, Glycine max
  Clone ID: PAT_MRT3847_96631C.1.pep
VRAAMGPKSEAEEEAATVTLSSDIGRVNRASTKSAVKLHEGGPRMTLQLVRIEKGLCSGEVFFNEYGKAGGKGKSDYEMQGEEDEEDQDGEHPEDSED

SEQ ID NO: 281962 - protein, 36 aa, Glycine max
  Clone ID: PAT_MRT3847_96632C.1.pep
GINRRFIKMASSSYLPSWRAVAITYITLSFLLTDLV

SEQ ID NO: 281963 - protein, 104 aa, Glycine max
  Clone ID: PAT_MRT3847_96633C.1.pep
SLALAKMCMSSGQYWLSQALPLLLCHQNDYESNLPYSKYREKNIDVVSFQVHNINVQHFEYARFSPAFLHVFLIFYRFLFESGFGPLRGRTSCKLLVAFFFFFS

SEQ ID NO: 281964 - protein, 114 aa, Glycine max
  Clone ID: PAT_MRT3847_96634C.1.pep
MVIPPPVRPPRITQFLKPYVLKMHFTNKYVSAQVIHTPTATVASSASSQEKALRSSLETSRDVAAAAKIGKILAERLLLKDIPAVSVHLKREQKYHGKVKAVIDSIREAGVKLL

SEQ ID NO: 281965 - protein, 115 aa, Glycine max
  unsure (1)..(115): unsure at all Xaa locations
  Clone ID: PAT_MRT3847_96635C.1.pep
MVIPPPVRPPRITQFLKPYVLKMNFTNKYVXAQVIHSPTATVASSASSQEKALRSNLETSRDVXAAAAKIGKILAERLLLKNIPAVSVHLKREQKYHGKVKAVIDSLREAGVKLL

SEQ ID NO: 281966 - protein, 83 aa, Glycine max
  unsure (1)..(83): unsure at all Xaa locations
  Clone ID: PAT_MRT3847_96636C.1.pep
SFSLRSSLTSPFKMQIFVKTLXGKTIXLXVXSSDTIDXVXAKIQDXXGIPPDQQXLIFAGKQLXDGXTLXDYNIQKESTFXLS

SEQ ID NO: 281967 - protein, 69 aa, Glycine max
  Clone ID: PAT_MRT3847_96637C.1.pep
TKHSTAPRIIIIYFIDNLPILQLNIFPMVKLTEEQNVRTQYEHAHLLKIALVLNFDDHKEILKFGWKHT

SEQ ID NO: 281968 - protein, 71 aa, Glycine max
  Clone ID: PAT_MRT3847_96638C.1.pep
IACVMVFVSCYIISSVRMPNHVNGFAAVLWMQTLTCSSVRTRAVRQIKVQVDRAFLAGVLDVENESAHSYV

SEQ ID NO: 281969 - protein, 50 aa, Glycine max
  Clone ID: PAT_MRT3847_96639C.1.pep
YPKCTFRKGKKNRHLSLFFCHEFSLRIIDECSKLYHFIWQFKRRIYTDAW

SEQ ID NO: 281970 - protein, 205 aa, Glycine max
  Clone ID: PAT_MRT3847_9663C.1.pep
MASSVALVLGLCLALNMVLPTRAATHTVGDTSGWALGADYSTWASGLKLKVGDSLVFNYGAGHTVDEVKESDYKSCTTGNSLSTDSSGTTTITLKTAGTHYFICASPGHCDGGMKLAVKVKAKKASAPATAPSPAAKDSPSDSDDTKDTPTSTSTNPKTSTSTTPSTETSTTTTSSYTSSATAAGSPIVAMFFASLIPYFVLRLM

SEQ ID NO: 281971 - protein, 97 aa, Glycine max
  Clone ID: PAT_MRT3847_96640C.1.pep
MSDSMRKGLGEQASEKITPDSQKSTTEKASESLTGAGDRIAGAVQPEGQKSTGQKLGDATRSGGDEGQGVMKQAQDALGNAGQSISDTLSGATGQKK

SEQ ID NO: 281972 - protein, 133 aa, Glycine max
  unsure (1)..(133): unsure at all Xaa locations
  Clone ID: PAT_MRT3847_96641C.1.pep
IFYAIFVDDKESNAIGTNLWQEESXCVEWFDTKQPIIVCNANFVSIAAMTSEQLTELAXWGLANSNKNYLWYIWTDLVAVENAVLPPELVTQTENRGLLHRGRFSYQGPAIPPEGGFLTHXGWNSNACKSCLG

SEQ ID NO: 281973 - protein, 43 aa, Glycine max
  Clone ID: PAT_MRT3847_96642C.1.pep
RQFPNPKLGHSNSSPFGHHPLFRTSSLKRYPSQPNHQHLPPPL

SEQ ID NO: 281974 - protein, 166 aa, Glycine max
  Clone ID: PAT_MRT3847_96643C.1.pep
PRVRPRVRGYLMLKIDFEKTYDKVDWEFLRVTLCEFGFPYTIIALVLNCITSTLLALRWNNEIIEGFNLSSGLCHRDPLSPYLFVLCMEKLALLIQQEVENNSWSPVRMTLLTKNGPSILHLFLSMTRRFICGISWSSTTIVIGAHMLIYLSFILTYMMLNFFIFV

SEQ ID NO: 281975 - protein, 34 aa, Glycine max
  Clone ID: PAT_MRT3847_96644C.1.pep
LPTSRKGGDSLVCMLTLGIVFVCLMKTKQIWSLY

SEQ ID NO: 281976 - protein, 171 aa, Glycine max
  unsure (1)..(171): unsure at all Xaa locations
  Clone ID: PAT_MRT3847_96645C.1.pep
MAMLAPSTRSPRIKYTTLFINGFGDYSLTGKTEETIYPTTGDALPRISEGDKQHIDIAVKAARHAWXNGPWPPLPGSDRARILLKWAEIIDENAXELAALDAIDAEKLYHMCRNVEVPATANTLRNYAGAAQKIHGEVLKMSRELHAYTXREPLGGVGHITTWNLPSTMLY

SEQ ID NO: 281977 - protein, 80 aa, Glycine max
  Clone ID: PAT_MRT3847_96646C.1.pep
FDSFLPSDLSSIISPTTFVLTYRSIKDLYLYLPYRPTNIYQSIISFQLEKPTWNKCYMLFARNLNLILGYTTYYWEWTTL

SEQ ID NO: 281978 - protein, 58 aa, Glycine max
  Clone ID: PAT_MRT3847_96647C.1.pep
QTSKNLFSYNGLNNSNNGDPPYAIGSYTLLFLPYAPFRQTLLPPIPQSFPPRRHHSLA

SEQ ID NO: 281979 - protein, 78 aa, Glycine max
  Clone ID: PAT_MRT3847_96648C.1.pep
FIKSCVPLPQSHRHSDASSHAQPLPQVQRSLDGDIVGSMLSPVLTCQPSHVALLSTWGRHTCESKQANVMNLGGLAFG

SEQ ID NO: 281980 - protein, 89 aa, Glycine max
  Clone ID: PAT_MRT3847_96649C.1.pep
CDHGLGIANWGEPTSICSSEDELSGSYRFKDVKQKAMEEVMNGKFKALVGRFLNLWEFPLLMKVIGVGWTSYIFIMGSCFFFEAWCNWR

SEQ ID NO: 281981 - protein, 80 aa, Glycine max
  unsure (1)..(80): unsure at all Xaa locations
  Clone ID: PAT_MRT3847_96650C.1.pep
MAMATQAFLFTPPLFGLKPRDRSTSPWKQSFTLSFSTFKPLKVSXTIIAASTDQTTYAPVGFTPPELDPNTPSPILRGST

SEQ ID NO: 281982 - protein, 95 aa, Glycine max
  Clone ID: PAT_MRT3847_96651C.1.pep
WTFISYLLWNINIIDLKKKKKKKQKKKKKKKKKKKKKKKKKKIKKKKMKNEMEENIKKKKKKGGGLLKEPNFPPRGWKQKFFFFGPPKLNPWAGF

SEQ ID NO: 281983 - protein, 256 aa, Glycine max
  Clone ID: PAT_MRT3847_96652C.1.pep
MNLQRYLFYYLHNEGQLGDVCWKTRLRIATEAAGALSYLHSEASIPIIHRDVKTANILLDDACTAKVSDFGASRLIPLDQTELATIVQGTIGYLDPEYMQTSQLTEKSDVYSFGVVLVELLTGEKPFSFDKPEDKRSLTVHFLCCLKEDRLFDVLQIGIYDEENKQEIMEVAILAAKCLRLRGEERPGMKEVAMELEGIRLMEKQPRTNAGQNFEETQYLLHGAYSTHENGDSSGQQNTGYDSLRDIELIDFGDGR

SEQ ID NO: 281984 - protein, 1156 aa, Glycine max
  unsure (1)..(1156): unsure at all Xaa locations
  Clone ID: PAT_MRT3847_96653C.1.pep
MFSSFSSSCLPLQLIPVSRLRSSVVKKLPEPLRRSIADCLSSPLSPSNEPSRTLQVSLSLRDSCFALDDYLKAPATTDLAYNAILEHTIAERERSPAVVSRCVALLKRYLLRYKPSEETLVQIDRFCSTIIAECDINPTQPWSRALNRQSGASTTSTNTSPLPVSTFASESLVKSLSYVRSLVAQHIPKRLFQPASFAGPPSSGQSLPTLSSLLSKSFNSQLTPASIPETQSSASVPETLEKDSSALSVSRLSKIEKADETEELGFIAHDVLKWRWLEEPQSSSIGTENDRAVNSQDMTAHSFLEIGAAALLVGDIESKMKGQPWKFFGTDDMPYLDQLLQSSPVTPITNSDSARPHLRAITASKRTKPGSRQICEQQPLRLNPAEVQDVIAAVCSEAYSPNTNVTTASTRLSNNSGKPSTDVAVSVLIKLIIDMYVLDSRTAAPLILSMLEDMLSSSKTACRVRAFDLILNLAVHAHLLEPIVADDASTIEEEYSQESYYDSDTQVMVQGSRKGSSQNKSDTGSAIDKFESWILNILYEILLLLVQEKDESVWASALSCLLYFVCDRGKIKRNRLHGLDIRPFIXLLCYKLLMFYVINYDXLSNLVTSNLPIGSEGTCKSVSGKPKFLVNQLDLIGGVQFIFIEVCISLLQYSLANSREERKNLYSVLFDYILHQINETCIATGVNDYSDDEIQPLAALLAQTNAPEAFYISVKLGVEGIGEILRRSIASALSRYPNSERLNMLLEVVAEKFDAVISTFTHLDKEFSHMNQITKSLKFLENMEGVVMRNGIGLQAKHSWATLHSLLHSERISYRQNGYIWLGDLLIAQINGERDGNIWSSITYFQKKIAQAGTQDSSNTSDVPLPILLMCGLLKSKYNYIRWGFLFVLERLLMRCKFLLDEHEMQQTSNRDLGHGKKDWHLEKANAIIDIMSGALSLVFQINETDRINILKMCDILFSQLCLRVPPAASLPFGDDGDNHAKQDTFHWDGHKEEANRRSGYHNNYHLDHETASMAALFQGRAVVPMQLIARVPAAILYWPLIQLAGAATDDIALGVAVGSKGRGNLPGATSDIRATLLLLLIGKCTVDPVAFREVGQEQFFRELLDDTDXKRRMMTEKPEKYQHMLQNLVVKAQQYCLIPFWEPVSSNVWHTSTGK

SEQ ID NO: 281985 - protein, 68 aa, Glycine max
  Clone ID: PAT_MRT3847_96654C.1.pep
IKYSFYFIRTYNYFIYLKIIILINKIIFSYLFNYENLIIFLKLYLFLNRIFFNLYYAKIGCYTRCIWW

SEQ ID NO: 281986 - protein, 102 aa, Glycine max
  Clone ID: PAT_MRT3847_96655C.1.pep
QPWSRALNRQSGASTTSTNTSPLPVSTFASASFAGPPSSGQSLPTLSSLLSKSFNSQLTPASIPETQSSASVPETLEKDSSALSVSRLSKIEKADETEELGF

SEQ ID NO: 281987 - protein, 230 aa, Glycine max
  Clone ID: PAT_MRT3847_96656C.1.pep
GSSRVPPAASLPFGDDVRHGRNFNHVNLSKRFDGDNHAKQDTFHWDGHKEEANRRSGYHNNYHLDHETASMAALFQGRAVVPMQLIARVPAAILYWPLIQLAGAATDDIALGVAVGSKGRGNLPGATSDIRATLLLLLIGKCTVDPVAFREVGQEQFFRELLDDTDSRVAYYSSAFLLKRMMTEKPEKYQHMLQNLVVKAQQSNNEKLLENPYLQMCGILQLANDLGIDL

SEQ ID NO: 281988 - protein, 155 aa, Glycine max
  Clone ID: PAT_MRT3847_96657C.1.pep
HIFFLKQNKITNINLKIQPSPMTTTLATMFFDDNTHHRSHLKNLLSLSIPLSPRWHRRQQHKITQKSSNHQSLTDQSHPTRSKTLSHCTGVLSSLWLLLVLIVRPLVDLLHSCFAFLAVDNHDAIMRDHNISLCGHHSFQIHPFHLLLPTYSKAE

SEQ ID NO: 281989 - protein, 158 aa, Glycine max
  Clone ID: PAT_MRT3847_96658C.1.pep
SYKIIFLFFLCTWGAKAEDPLGRFCNENTIIGSGGKLSANIDKILTEIALKTPSTGFVATTYGKDQDKVYALAQCRGDVSTQDCSNCIQDATKQIRQRCPNQVDGRIWYDYCFLRYSNKSFFGEVDTSFGIFYFNVENVTDPEDFNKELGALMDHIRA

SEQ ID NO: 281990 - protein, 105 aa, Glycine max
  Clone ID: PAT_MRT3847_96659C.1.pep
MERRKGSGSFLTTEDLRRETGINCSGRHEELKLENIIGLVSIGFGIISISESGRRRRNYCTFELNAIERFENREIGRSKQVRSQVLRCVPLLYVAPLVLDLRFEI

SEQ ID NO: 281991 - protein, 97 aa, Glycine max
  unsure (1)..(97): unsure at all Xaa locations
  Clone ID: PAT_MRT3847_9665C.1.pep
WSPKPQMHMIIESLKDYVHNIVSISRKQPPNYPIPIPCLNLYIYDAIIFKLNHLYTRFFSSFLLGKVTLARLYSLFNFDFQNYGPFVHDIXMAHLNR

SEQ ID NO: 281992 - protein, 228 aa, Glycine max
  unsure (1)..(228): unsure at all Xaa locations
  Clone ID: PAT_MRT3847_96660C.1.pep
PGSTHASAKAQFVSGRTFKYDIIGAGSHSSEELSEEKNQGKVKQVDARLRQRIDPQYNEVQAQMETNLFKLSLDDVETPKGSMLDLKISQSKIALPKNTVGGTILRSDLLANFLTEGNFRASVDLQRTHRIKGMIKMVATVGIPENTGIALACAMNSSIRGRASSDIYTICSQDCELWNPACTKAMTMSFNPNPCSDAWSLEFLKRTVFHXDISCVTGWTATPCKMFK

SEQ ID NO: 281993 - protein, 265 aa, Glycine max
  unsure (1)..(265): unsure at all Xaa locations
  Clone ID: PAT_MRT3847_96661C.1.pep
MTRKVSNFSDLIQRVTASCLLHPLATAAAAVKEDDNSPYESEDNRNDSEEEENENDDEYEDEERLVGPLKAFKVKQMEALMEQVFETVSSMKRAYVRLQEAHSPWDPERMRSADVAVVSELRKLAVLRERFRRSGGGDDDGRRKGRRRGGGGGVASVREVVAPYEAVVEELKKEVKVKDMEVKNLREKLDSAAAFTTNGSAQKKPGRSLSKRKLGIQAMAAVPTPELFEATLVQVREASKSFTSLLLSLMHNAHWXDITAAVRSI

SEQ ID NO: 281994 - protein, 108 aa, Glycine max
  unsure (1)..(108): unsure at all Xaa locations
  Clone ID: PAT_MRT3847_96662C.1.pep
MFSGLVGVENPLQQQQQQQQQQQQQQQQNLHHLQHHHPQMVPYATHHDTENPHHPHLHQSIKQGYPPFSSQTKQQQSPISDDDEPGFPADEDPKRKVSPWHXMKWSDT

SEQ ID NO: 281995 - protein, 106 aa, Glycine max
  Clone ID: PAT_MRT3847_96663C.1.pep
MEPNGLGSGMFSGLVGVENPLQQQQQQQQQQQQQQQQNLHHLQHHHPQMVPYATHHDTENPHHPHLHQSIKQGYPPFSSQTKQQQSPLSDDDEPGFPADEDPKRKV

SEQ ID NO: 281996 - protein, 179 aa, Glycine max
  Clone ID: PAT_MRT3847_96664C.1.pep
FACWVWGVLVVDLSVVRNKDPEWFFFCPQDRKYPNGHRLNRATNHGYWKATGKDRKIKSGTILIGMKKTLVFYTGRAPKGNRTNWVMHEYRPTLKELDGTNPGQNPYVLCRLFKKHDESLEVSHCDEAEPTASTPVAAYYSTEEIQSDLAVVAGSPSQVTEDDKHQSMIPAHSEEAISN

SEQ ID NO: 281997 - protein, 66 aa, Glycine max
  Clone ID: PAT_MRT3847_96665C.1.pep
QIVSVDGDFTGPTSVSSDLQSQLRFSSCVLNSPKQLVNFKLGRSLAQNYSHRICNEDYLLIYSFYN

SEQ ID NO: 281998 - protein, 158 aa, Glycine max
  unsure (1)..(158): unsure at all Xaa locations
  Clone ID: PAT_MRT3847_96666C.1.pep
GSREKVTELLQLLLTPMVHPGPACVHALGANLIXSVGIPYCITRGFSIAGNKMALPDTGLMSYGEMLEQGQLINQAALIPVIGHPHYGYGDAMNLKPTAKGFIAGSCARIILEDQIAPKACEHTRGRDVIPSEVGFMKISALADAKRESVSDIVIVGL

SEQ ID NO: 281999 - protein, 110 aa, Glycine max
  unsure (1)..(110): unsure at all Xaa locations
  Clone ID: PAT_MRT3847_96667C.1.pep
YFFLFIIHNKRTIRAFYLKGRGEHXHALQVNSTILXLSTYKAQNKPSISSIYLYFLNKNILENLSIXTLPTANNLRSYFIPAFTREXYMKPNLINTNWEDICTINYILNT

SEQ ID NO: 282000 - protein, 139 aa, Glycine max
  unsure (1)..(139): unsure at all Xaa locations
  Clone ID: PAT_MRT3847_96668C.1.pep
RTRGLSFYGYTICAQRARGLSEKGSEQWPHVTATCDATQPLHGPGVKYDQAHDXPGGFEDRVHYIGRTGRASPKRTEYTYFSAAKASIVRELIALLTVPRQKETAAIXSMGRXAPQPPASTRSYQDRRNRDGTACARNR

SEQ ID NO: 282001 - protein, 80 aa, Glycine max
  Clone ID: PAT_MRT3847_96669C.1.pep
TSDNASEGFDKTTVRILVRMRPLTGTKRHIMVYATILMDLKLGCIIQMTKIGKSRVTELHISNILAGTIDRRTHQSWSSA

SEQ ID NO: 282002 - protein, 78 aa, Glycine max
  Clone ID: PAT_MRT3847_9666C.1.pep
PEWHMSSDTPWDQTMSCVSRSDENSVTCGVNTARGFQIQHSVGHANTPFVPKRSWSTSSSISCLLREARTEDDDEKLR

SEQ ID NO: 282003 - protein, 55 aa, Glycine max
  Clone ID: PAT_MRT3847_96670C.1.pep
KINPLKLSYLPKTTQLHLKYSSQALRDSYICKGKKGIMQAITNSHTWQQVWEAWW

SEQ ID NO: 282004 - protein, 68 aa, Glycine max
  Clone ID: PAT_MRT3847_96671C.1.pep
VPVPAGVPAFPNACRLKMRYCVQYTSSLPLIPFIRLCVMRTGLRLLQLLLRTLDAPNRSTAPLYRAFS

SEQ ID NO: 282005 - protein, 52 aa, Glycine max
  Clone ID: PAT_MRT3847_96672C.1.pep
FLESLQTAPACADQPLGAWCRHPIVPTSLKNRMAWTASVNSGMGPRAAGVKL

SEQ ID NO: 282006 - protein, 34 aa, Glycine max
  Clone ID: PAT_MRT3847_96673C.1.pep
YDNLITISAELGYEQKSKNHTNNSKSNCSYPLMG

SEQ ID NO: 282007 - protein, 107 aa, Glycine max
  Clone ID: PAT_MRT3847_96674C.1.pep
MGEHASDNQLWSHVLSGVGSDGELHNSQEIGENFLDALSSKSMTSTMFQPVCDYLKKLDHTSWEYNGSTSLNSFEKHLNGFSEAMLENNERLTKLSNLVSTWSIAPP

SEQ ID NO: 282008 - protein, 77 aa, Glycine max
  unsure (1)..(77): unsure at all Xaa locations
  Clone ID: PAT_MRT3847_96675C.1.pep
MQCPHPVLPGIKAISGKPVLAHSGFMLSPXKAYSLHLRTLKSGCFWGHHCYASYFYVRQRCANSDCDESLFCNCIQG

SEQ ID NO: 282009 - protein, 76 aa, Glycine max
  unsure (1)..(76): unsure at all Xaa locations
  Clone ID: PAT_MRT3847_96676C.1.pep
XNSHPLASCSLFLIHVMLTSLPNTLCLRGXWXXLEXIIISXHVKTXHHTTXIIPXSLQYXXQXIXXXQKPLEXEIT

SEQ ID NO: 282010 - protein, 696 aa, Glycine max
  unsure (1)..(696): unsure at all Xaa locations
  Clone ID: PAT_MRT3847_96677C.1.pep
MTVEKKMNDSGDEFPVGMRVLAVDDDPTCLLVLETLLRRCQYHATTTNQAIKALALLREHKDKFDLVISDVHMPDMDGFKLLELVGLEMDLPVIMLSANGDTKLVMKGISHGACDYLLKPVRMEELKNIWQHVIRRKKFDSKEKNKTRNIDKPTSNSSNGLGSSGTGNSDHNEKLTKKRKDQDRTAYEQQXNDHDNDDPSAQKKPRVVWSVELHRKFVAAVNQLGIDKAVPKKILDLMNVEKLTRENVASHLQKYRLYLKRISCVANQQTNMVVALGGADPSYLRMNSVSGVGHIQSISGSGQLHNNAFRSFPPSGIINRLNTPAGLNVHGFPSGVLQLSQSQNLKNTNDNLKFQSAIVPANQNGVHGMTVSVGLDQLQNNKGVMSVQNLTTVFDAKTTFPISNKLPDPRPKITNSGSHTPDVSFSNNALMLEPRPQGTQGSVRIETLSSSVASQHSEFSLSLLDQGRYSDNWASTVQPSVIQTNSYPPSECFGQTNIPPTDNMASVPLQGGNLSGASITSLSRQSYDSMTDMHSEGVTFTNRPGHISSNVPYQGWHDNNQDATHHSNILSINSLTPVNGAAVPAGHAAMNSALHRNLDFNYCDPLQMKHEGFVELTDEALSKQHQGNIMNLPKSQQSHFSNNLGSLEDLVSSMMKQENDKMKLLDGNLICNNYSGGLSRCDSRFSSTFQNIMHPR

SEQ ID NO: 282011 - protein, 62 aa, Glycine max
  Clone ID: PAT_MRT3847_96678C.1.pep
GILFLGGGFLCLRSRLLLKRSPPVFKSLSPFGVFRPSACCFSRTGFKREALFSLGLFTLIIF

SEQ ID NO: 282012 - protein, 606 aa, Glycine max
  Clone ID: PAT_MRT3847_96679C.1.pep
ARRRQKGREHKDKFDLVISDVHMPDMDGFKLLELVGLEMDLPVIMLSANGDTKMVMKGISHGACDYLLKPVRMEELKNIWQHVIRRKKFDSKEKNKTSNLDKPTSNSGNGLGSSGTGNSDQNEKLTKKRKDQDEDEDEDQENDLDNEDPSAQKKPRVVWSVDLHRKFVAAVNQLGIDKAVPKKILDLMNVEKLTRENVASHLQKYRLYLKRISCVANQQANMVAALGVADPSYLRMSSVSGVGHVQTLSGSGQLHNNNFRSFPPSGIINRLNTPAGLNVHGFPSGVLQLSQSQNLNNANDHHKFQSVIVPVNQNGVQGMTVSVGLDQLQNNKVVMSVQNLTTVFDAKTTFPIPNKLPDPRPKITNSVSHTSDVHFSNNALMLEPRPQGSQGSVRIGTLSSSVASQHSEFSLSLLDQGRYSDNWTSAVQPSVIQTNFFPPSECFRQTNIPPADNMASVPLQGGNLSGPSITSLSRQSHDSMTEMHSEGMTFTNRPGHTSSNVPFQGWDDHNQDATHHSNIMSINSLTPVNGAAVQAGHAATNSVLHRNLDFNYCDPLQMKHEGFVELTDETLLKQHQGNTMDQQKSQENHFSNNLGSLEDLVSSMMK

SEQ ID NO: 282013 - protein, 86 aa, Glycine max
  Clone ID: PAT_MRT3847_9667C.1.pep
RAAPAGRCMAASWRIRSSRIQHRLSLTRPTTLHRQMILSLSLFRCNTFLMMIRAFVLDIALAAHVLLPARSLIHRCSQQRLSLVLR

SEQ ID NO: 282014 - protein, 82 aa, Glycine max
  Clone ID: PAT_MRT3847_96680C.1.pep
NQFLEDNVDPLGGLKTQSYSLVSNFPRPVYGQKKFPLSFKEGGLHPQASLFLELSSLKTSLPKVFMKTKRGPQKNLRVHFFV

SEQ ID NO: 282015 - protein, 82 aa, Glycine max
  Clone ID: PAT_MRT3847_96681C.1.pep
IRGPQKKNFFPPPRGCKIGSPKTAPPCLFLIFYFFVFLCLFFFFPLFWFPFFFFFFFFFFFFFFFSGWEKSNSQHDEDFLTY

SEQ ID NO: 282016 - protein, 80 aa, Glycine max
  unsure (1)..(80): unsure at all Xaa locations
  Clone ID: PAT_MRT3847_96682C.1.pep
MVAVQLLVDVSLKVQAVKCTPVDLNPCLGAITSSQPPSEICCHKVRESWQCLCGXLKTPILRPYANSPVSKRVATPFGVP

SEQ ID NO: 282017 - protein, 40 aa, Glycine max
  unsure (1)..(40): unsure at all Xaa locations
  Clone ID: PAT_MRT3847_96683C.1.pep
VPFPFLXXPXXXCLXLLXAPCXXCLXPCRWXLXAFSLVVL

SEQ ID NO: 282018 - protein, 325 aa, Glycine max
  Clone ID: PAT_MRT3847_96684C.1.pep
HLKFNYLTRSLGNLYRAAANALNLEQWRLQKLKELCEGNQMIRSSYNEDCTRHEGRISRNIRQIRGISDNVRSKASELTKLLSHPQSFQSISIEIFAKKVVAYCANPANVPFASAYVIVLVTSQVPHAMDILLAELHRACIYTVPKHLVYKKSAYQSKEAYFRSIGYREDDGKMESTEDYLKRLESYMKMYGALVQTEITNCQNFHGLKEGWAWLARFLNTHPANQYTAVSLNAFLQMAGFALYNRYKSQFLKMLNVVSENFLVDLKSQNIPELARTVTEIQTYIDDKKFLQEPEGRSLQSDLLSTKILQEADRWIPKPSFNNYY

SEQ ID NO: 282019 - protein, 65 aa, Glycine max
  Clone ID: PAT_MRT3847_96685C.1.pep
PGSDKSKRVKWTGIWNLNSKAARSFSPSKFYHAIDWIEVTVVPYYPGVRKLYRHKKPMVSWPLDR

SEQ ID NO: 282020 - protein, 654 aa, Glycine max
  Clone ID: PAT_MRT3847_96686C.1.pep
LEQQQIRRDKVRFEAAPLVGIEEEEPVYETAGMLSEMFNFPPATELLEQQHATATFRAARQAGEWYGNRQQQQQISGINADSAAAMQLFLMNPQTRSPSPPQTHATPSSTLHMLLPNPSSNSSLQGFTGSAAGGSFGQFTWVPESAHQQGGVVEGQGLSLSLSSSLEAAKAEELRMGDSGFLYYNHQQGGGGGGGSSSSSADQFQYKNNNNNHHQALHLQGAMGHDNNHQGHVGFGSSSVGVVNVLRNSKYAMAAQELLEEFCSVGRGQFKKSKFNRQNSNPNSNAGGGASPSSKDAPPPPPLSAADRIEHQRRKVKLLSMLDEVDRRYNHYCEQMQMVVNSFDLMMGFGAAGPYTALAQKAMSRHFRCLKEAITAQLKQSCEVLGDKDGAGSSGGLTKGETPMLKMLEQSLRQQRAFHQMGMMEQEAWRPQRGLPERSVNILRAWLFEHFLHPYPSDADKHLLARQTGLSRNQVSNWFINARVRLWKPMVEDMYQQELKEAEGAEEEREGNQSSSNNSGHQLAQTPTPSTTASTATAPPPPTTTPPTGKRSDSESDPSLAPINNTTSTAAMTVTASEVTQLSELPRTMVADESCRHGSLVATEFGTASAASEIGSTLIRFGTTAGDVSLTLGLRHAGNMPEKTPFSVRDFGGI

SEQ ID NO: 282021 - protein, 60 aa, Glycine max
  Clone ID: PAT_MRT3847_96687C.1.pep
VLFAYVLCSILGTKILRKPITLFSFISMLKIFECQLWRLQLALGEQTEITTTRKIAYYIS

SEQ ID NO: 282022 - protein, 117 aa, Glycine max
  Clone ID: PAT_MRT3847_96688C.1.pep
DRNIIERNIRLKIQQSPDYAEEPDFETGLQDFKNRLENYEKVYETVNEGSYIKMIDMVSGHGGQIQVNNISGYLPGRIVFFLVNTHLTPRPILLTRHGESQDNVRGRIGGDTCNSEA

SEQ ID NO: 282023 - protein, 100 aa, Glycine max
  unsure (1)..(100): unsure at all Xaa locations
  Clone ID: PAT_MRT3847_96689C.1.pep
GHTSFENDTRVYVGNLYXPVTDTELEDEHRVFXAIRRVRVARKPPCYAFIDFDDRRYAQEAIRKLYGGNVLRVELSHNSIGGRGGRGGRSDGSDSKCYQC

SEQ ID NO: 282024 - protein, 112 aa, Glycine max
  unsure (1)..(112): unsure at all Xaa locations
  Clone ID: PAT_MRT3847_9668C.1.pep
TKILHFHNFVIGGHSGDDLTYRRIKDQFYWKGLQKAVKKWVQECITCQQNKPLLRMPAGLLXPLSIPDRAWKSISMDFIVGLPKSNDITFIFVVCDRLTKYAHFLPLAHPFE

SEQ ID NO: 282025 - protein, 147 aa, Glycine max
  Clone ID: PAT_MRT3847_96690C.1.pep
MRTHTHTYTYTIFSLILLSLFLRTHSEVITLTSDTFNDKIKEKDTAWFVKFCVPWCKHCKNLGSLWDDLGKAMEGEDEIEVGEVDCGMDKAVCSKVDIHSYPTFKVFYDGEEVARYQGTRDVESMKTFVLEEAEKAAAKALESNKEL

SEQ ID NO: 282026 - protein, 121 aa, Glycine max
  unsure (1)..(121): unsure at all Xaa locations
  Clone ID: PAT_MRT3847_96691C.1.pep
STFSSSWKLKLFLKAQVHHVTQKSALKGPIKVTISHASKIDISDPVSLTHALRGLCISQASXMAALKRLTKPCSSSIVSEAGTIKRLYTALVDEGKGNLVEISLVPDISAPSDKLSRVTIS

SEQ ID NO: 282027 - protein, 66 aa, Glycine max
  Clone ID: PAT_MRT3847_96692C.1.pep
SLCTVTVSGMISIPKMTRLLNQRPIHTYVPHAIGDRDLCLRDFAQTIYATFVKTRYGHSYMDCSDH

SEQ ID NO: 282028 - protein, 154 aa, Glycine max
  Clone ID: PAT_MRT3847_96693C.1.pep
MEFKAILLLLAFAACYAAAVVEQDDGSFQFDVIQQSVHKDAFKAQQLKRLAKLGKAARSLPKYHQKLIDAPFKNDWILANVTFGQQGPFNLAFSTGAVRAWVIGEDAENIKSGVHIYYPDDSDTSKDLQKTFTQYDGTYTTTAEWFTDLMHLEK

SEQ ID NO: 282029 - protein, 74 aa, Glycine max
  Clone ID: PAT_MRT3847_96694C.1.pep
MSVYRLLLRGVAVARPMFSLTQTRSYAFSSVEEAAVERRPPKRWLRIEPPLNAIRTPPQQGPSREPNAPRLPDS

SEQ ID NO: 282030 - protein, 55 aa, Glycine max
  Clone ID: PAT_MRT3847_96695C.1.pep
LKHMQPCLNFLKRIISITYPMLLYDILLYTRSLTNSSSIEDLIINIRLPALSSNL

SEQ ID NO: 282031 - protein, 143 aa, Glycine max
  Clone ID: PAT_MRT3847_96696C.1.pep
YGCEKTTEGKGLDQKVTTEKPRSSSPFRRFSFSIGFTGKGSGCKEVAHVPHQSSIAALKSSSENVRGYASSKISGNDKPGNAVKSRSSSPLRRLLDPLLKPKTSDHRSVESSQKDSVVIKKNCRSANGGFAMEKELDRDQRVG

SEQ ID NO: 282032 - protein, 94 aa, Glycine max
  Clone ID: PAT_MRT3847_96697C.1.pep
SSLRSLAHSSTVRNLSPNRLSACLLLSTFVAIHLVYYSVLSYYSSTPSLQPSLSLRHPPHLLSVSKTLLLPLNLLLSPPPPPPPPPKQVVLLHM

SEQ ID NO: 282033 - protein, 62 aa, Glycine max
  unsure (1)..(62): unsure at all Xaa locations
  Clone ID: PAT_MRT3847_96698C.1.pep
ERAQDTFLFTCEFVNXGHSDXLCDQICDXAVLYACLVQDPCCXDDCETCTKTNMVMVFGEIT

SEQ ID NO: 282034 - protein, 61 aa, Glycine max
  Clone ID: PAT_MRT3847_96699C.1.pep
FDIIFGAPKGSNESACYYHPYIGNRKYVGRILFCNNWHTIRIKGENYSNRHYPELPLSTHA

SEQ ID NO: 282035 - protein, 30 aa, Glycine max
  Clone ID: PAT_MRT3847_9669C.1.pep
PNRYIWRLVNLIHYNKKAVSASPFCNIHLH

SEQ ID NO: 282036 - protein, 73 aa, Glycine max
  Clone ID: PAT_MRT3847_966C.1.pep
KTKGLLVSNKYITALTIRVAPKECFRCIIAASPCHAQYSFCYVPCKSHWGSHSNKPPAPPCKPVTYNALNPHR

SEQ ID NO: 282037 - protein, 61 aa, Glycine max
  unsure (1)..(61): unsure at all Xaa locations
  Clone ID: PAT_MRT3847_96700C.1.pep
KNKIKKKKKKKNKKKIKTKKKKKKKIKKXKKKNLKKFKKNNNKKQEECLPIKIRFLINSVN

SEQ ID NO: 282038 - protein, 128 aa, Glycine max
  Clone ID: PAT_MRT3847_96701C.1.pep
RKTAQQSNRLIHYFSSKMARARRVVVLAVVMFAIIGLACAKKPAPPPEASADDYEDDDYSIGALTAASGAASSPNSVVAAPIGGPVPPGAFDNAKGGSPSSAAASSSLGHFSAVAGAASAALAGFFYF

SEQ ID NO: 282039 - protein, 84 aa, Glycine max
  unsure (1)..(84): unsure at all Xaa locations
  Clone ID: PAT_MRT3847_96702C.1.pep
CRTHDSSGSTTPGQHVIGEKLATHNNXSAPQLQDDISGTRAQGTIPQPIAQQTEXNQKATVGTPSHWDTSXQKVCQSPIDPLGG

SEQ ID NO: 282040 - protein, 58 aa, Glycine max
  Clone ID: PAT_MRT3847_96703C.1.pep
RGRINLYLFKGLPVLSNHCKCWKRNWGLKASNFGFQGLPNNRDCIVTRIAKCKKISCL

SEQ ID NO: 282041 - protein, 61 aa, Glycine max
  unsure (1)..(61): unsure at all Xaa locations
  Clone ID: PAT_MRT3847_96704C.1.pep
GXQVASNXPXXVNNXEQXRGXGWSSTXTAGXLAGPRXEXRRLXPXNALXLXNVNXRSYVHA

SEQ ID NO: 282042 - protein, 68 aa, Glycine max
  Clone ID: PAT_MRT3847_96705C.1.pep
TNLSIFSFLTLPYASNIAHTLQEFYYTKQTCSKEEIVFFLMNEHHVFLKRRKYTIVIIENDCEYFCRN

SEQ ID NO: 282043 - protein, 76 aa, Glycine max
  Clone ID: PAT_MRT3847_96706C.1.pep
IRGHTNPKKKKIFIKMGGQEKKKTLENRIIIRQNSLLGPPIYPQVGGGPPKNLIYQWGPPILKKRAGGGPQGTMGG

SEQ ID NO: 282044 - protein, 143 aa, Glycine max
  unsure (1)..(143): unsure at all Xaa locations
  Clone ID: PAT_MRT3847_96707C.1.pep
RPPKXXQTQRGNFPXRXGHPRGXQGKTREETPTNSTXGXQXARXKAYKGHRXAQVNRGKDPGTNTKHNGRAGTNQIREQTAATERKTNQEKTNPLTDAGKPKRPGHGGQPQQPLPFQGTRTDLGTPKGTGGNLGHPKTEGKPE

SEQ ID NO: 282045 - protein, 141 aa, Glycine max
  unsure (1)..(141): unsure at all Xaa locations
  Clone ID: PAT_MRT3847_96708C.1.pep
TEGEGRELKIGGGPPVKKQIAWERXVLHKXISEXSLPKSCAMQFPNGEDDLRNFXVSIXPEDGYYLGGAFLVSFQVSPIYPHEXPKGGGRXXGYHPNIXLXXGNXFCXNILTRKSWEPXLNINTGIYGVXYLFTEPNYEGP

SEQ ID NO: 282046 - protein, 39 aa, Glycine max
  unsure (1)..(39): unsure at all Xaa locations
  Clone ID: PAT_MRT3847_96709C.1.pep
WNMSSDMVXLWPQRSRYXPRHSXVSXXXXXRTXXFAXLV

SEQ ID NO: 282047 - protein, 134 aa, Glycine max
  Clone ID: PAT_MRT3847_9670C.1.pep
MEKENELHAKTLICALNLLSRDLPLPPHILNSVSSIYRNKHGDGGISREDLMTDLEDALSKQRPNCVSGFKLEQARDNRYRSQIQHRLNELQELPSSRGEDLQTKCLLELYGLKLAELQMKVRSDVSSEYWLNA

SEQ ID NO: 282048 - protein, 64 aa, Glycine max
  Clone ID: PAT_MRT3847_96710C.1.pep
TLKIAATTVEEVLSRAFYASLKTRNSFIADEVPFCPASASSVTKSSRCDGTMATNFFITSAARL

SEQ ID NO: 282049 - protein, 64 aa, Glycine max
  Clone ID: PAT_MRT3847_96711C.1.pep
HIQSYKNKGNHCLWRLLLPMKITILQKGKIQANNSRLLGHSYGNVPKQFNVIGTLQGVLIVFYF

SEQ ID NO: 282050 - protein, 120 aa, Glycine max
  Clone ID: PAT_MRT3847_96712C.1.pep
FVLRTGLRLHRVADFLHEGWYEGRRRRRRGKGDIRSKVARARFYFSFSGDRSLISLALKLPLLSSSQNHALRPNSHDHALLSSSHDHALLSSSDDHALLSSSDEHALLSLLTTMQAQNQP

SEQ ID NO: 282051 - protein, 61 aa, Glycine max
  Clone ID: PAT_MRT3847_96713C.1.pep
NIARAPYSLMKPFALWTQSSPRGITVTEAVSCFFHRPSHDQVRSYCHRKLATSLLLLKNMS

SEQ ID NO: 282052 - protein, 69 aa, Glycine max
  Clone ID: PAT_MRT3847_96714C.1.pep
WGYGQCNSCWEVGMTPLPVKCPCKPPFKVLSCSWLLIPPPIPLCAVLRFLIVNFARQLVHWPARSMFDS

SEQ ID NO: 282053 - protein, 333 aa, Glycine max
  Clone ID: PAT_MRT3847_96715C.1.pep
PDWSLNSAAVVESSVNLKKKNIRNGKNKQKHEESSSQAALPSAIPKESNLSKSSVESDKSKASDFELDQGSLQPAPLSKDPNQFSEQHKYLANEESHGRMNSQWKSQHSRRMPKNMQANRPAEKSHGTDAVMWAPVKPQSKSEIVDELSEISKIEAVNPLKSEQQVHNLKNKRAEMERYVPKPVAKEMAQQGNIQQVASSSSQAPTDDSIGRVDSASLGPQVIQHTNLVVGKVGSGMESKNKDGRHIKQGKAHGSWRQRNLTESTNVHEVHDGLDHDLNSGPTEHHHDQKAEVSFVKGQTKHFNDSGDIDGSYNSNSNNAAALGSAPVIKDYS

SEQ ID NO: 282054 - protein, 62 aa, Glycine max
  Clone ID: PAT_MRT3847_96716C.1.pep
SVLLLWWSGVGVGFSPNRKRSCAGGNGGSGTPGNCGNGCGGCKMYPNWTKTDSTTTETLAME

SEQ ID NO: 282055 - protein, 51 aa, Glycine max
  unsure (1)..(51): unsure at all Xaa locations
  Clone ID: PAT_MRT3847_96717C.1.pep
XXXXLXCIXXFLLXXSXXVSXXLXXXXSXSLCXCXSLXXLEXNSVLXXVSX

SEQ ID NO: 282056 - protein, 58 aa, Glycine max
  unsure (1)..(58): unsure at all Xaa locations
  Clone ID: PAT_MRT3847_96718C.1.pep
VYILIVRQISLMIXSNIPCHMCILILADCSFRHNHHISHIENYRDSQTLSSHKSPIAN

SEQ ID NO: 282057 - protein, 82 aa, Glycine max
  unsure (1)..(82): unsure at all Xaa locations
  Clone ID: PAT_MRT3847_96719C.1.pep
KVAKGSSXLSSKFSYQFFEGFIPKSYSKNRRIFHPSFHQIEHPFQEGMGTCEFSPGWVPNIIRLTTIFITGTGVPIYFLTPF

SEQ ID NO: 282058 - protein, 44 aa, Glycine max
  Clone ID: PAT_MRT3847_9671C.1.pep
RVHVIMVSFTEKSLLLFYYSLYFLIDIPQGETPNPRLFFYLLKK

SEQ ID NO: 282059 - protein, 94 aa, Glycine max
  Clone ID: PAT_MRT3847_96720C.1.pep
MDSKTKIALLIPGMLAMLLLFSKVAARDFNEGEVVKETNEEGNAKSDGGGGNLHFMSCSHPTPSGHCPCGCCSGFTESGGCEKCCASPPGGGYP

SEQ ID NO: 282060 - protein, 113 aa, Glycine max
  unsure (1)..(113): unsure at all Xaa locations
  Clone ID: PAT_MRT3847_96721C.1.pep
TFTHNGETDTYPYYMELTSFHHIMNGCVLPXHNVTLAELAGIHGPDVNSXGIFSMXSDDTATHEDMYGKCEHEGIFPTALNTDSGQAAVILPLSEYGEVAPTTVFLSMRHNYC

SEQ ID NO: 282061 - protein, 188 aa, Glycine max
  unsure (1)..(188): unsure at all Xaa locations
  Clone ID: PAT_MRT3847_96722C.1.pep
FETGDSLGLNVSTPDASLIEERNDLAXAIVSAETASTALDSSGAQARDFDPTEWEIALVSTPSTNISSVNERQLAGGLNSLTLSSLYDEGAYRSAQQPVYVVPAPNPFEVQDPFALSSSIPPTSTVQMAAIAQQHINPFLHYQPYQPLQQHMLMNPANPFGDAGYGAFPVNPVSHPHNKNPFGSTGLM

SEQ ID NO: 282062 - protein, 51 aa, Glycine max
  Clone ID: PAT_MRT3847_96723C.1.pep
CLPVFSATDAKCNARDSHVPLPIGFAVFLVHLATIPITGTGINPARSLGAA

SEQ ID NO: 282063 - protein, 424 aa, Glycine max
  Clone ID: PAT_MRT3847_96724C.1.pep
MASLPSFTPFVFLLLVIGCNARPLYPLPSKGDDGNRKPLQTFRPYNIAHRGSNGELPEETHPAYLRAIEEGADFIETDILSSKDGVLVCFHDVTLDNTTDIANRTEFANRKRTYEVQGENMTGFFTVDFTLKELKSLRVKQRCSFRDQQFNGKFQIITFEEFITIALDAPRVVGIYPEIKNPVFINQHVKWSHGSKVEDKFVETLQKYGYKGSYLSKDWLRQPVFIQSFAPTSLVYISNKTDLPKVFLIDDVTVPTQDTNQSYWEITSDEYLEYIKQYVVGIGPWKDTVVPVVKNYMTNPTNLVARAHAHNLQVHPYTYRNEFPFLHFNFSQDPYMEYDFWINKIGVDGLFTDFTGSLHRYQEWTSNRKDDDDDKTESNLLHKIALLVSSYECILRIHMAISVWINLLCSKNAYNNIYKRAFEF

SEQ ID NO: 282064 - protein, 90 aa, Glycine max
  Clone ID: PAT_MRT3847_96725C.1.pep
QASVFHTEPVYEAAHPGPFESVSETMIILDGFLTCMGSWPPGLIDLSKEFDRFSTNVVAKFKLAWGGDTKKVAKPPVSLSILSAGVSWQL

SEQ ID NO: 282065 - protein, 48 aa, Glycine max
  Clone ID: PAT_MRT3847_96726C.1.pep
MCCKLFLVDTRIYLLCSSLECVSQNPVKRLILPYSFKCIIPVVITHTL

SEQ ID NO: 282066 - protein, 62 aa, Glycine max
  Clone ID: PAT_MRT3847_96727C.1.pep
LPFPVKGRMFPMSPTSLSNCPRQQRCFLHFASVNPLTLHYLSREFRQYLRAPCAQQVSRAAS

SEQ ID NO: 282067 - protein, 76 aa, Glycine max
  Clone ID: PAT_MRT3847_96728C.1.pep
TTTEHKPTRVPHPLPPPEHKPTRAPHPPPPVEHQPEPKPTPKPEPEPEHEYGYYTFGEEISLKCEHGKIVVKGKKA

SEQ ID NO: 282068 - protein, 59 aa, Glycine max
  Clone ID: PAT_MRT3847_96729C.1.pep
IPPFSPFLSLSPSGSFQNSLKTEMGARQRVFTHSSCTAVLFLYTLSIGFRFRPTDEGAY

SEQ ID NO: 282069 - protein, 85 aa, Glycine max
  Clone ID: PAT_MRT3847_9672C.1.pep
IRLEYGCEKTTEGGENRDPVKTISFSLCLVWPLAVRSQPQYCCAPVEPSMVCFSFFHVPFAVSICLVNNHNPFVSSQGFNRFHIG

SEQ ID NO: 282070 - protein, 49 aa, Glycine max
  Clone ID: PAT_MRT3847_96730C.1.pep
YCKMFFFCNKVQHYVHILNNSVNNKQSTIYPPIQNFIKTYYIFHYNSFP

SEQ ID NO: 282071 - protein, 66 aa, Glycine max
  Clone ID: PAT_MRT3847_96731C.1.pep
GATPMTTVLLVVDSVQLRYGYMLQHLQQMQNRQSYRRLTATTAARYHHVRETANTETDHHQMQYVK

SEQ ID NO: 282072 - protein, 85 aa, Glycine max
  Clone ID: PAT_MRT3847_96732C.1.pep
SFAEECRPFILSHMLRRLSLCCSIGLICLGVFKKEYFSYMVCCFEAHAFKYLAGHFPSTNARCPPSIVSGIGNMFVSISRIYVFG

SEQ ID NO: 282073 - protein, 87 aa, Glycine max
  Clone ID: PAT_MRT3847_96733C.1.pep
GVYFRAPFFGAQTQLGRGLFRAKGIVGPLKLESFPARTPLFFFKTPGSPLGFRGAPFCFFSPFFFGRVKTPAQKRVQTQKIFFPPPG

SEQ ID NO: 282074 - protein, 111 aa, Glycine max
  Clone ID: PAT_MRT3847_96734C.1.pep
MALILLLFLGMSISYYEVDARSKNLPDMQQSFTRSLNLKSILPTMNSDFECIGIYKQPAFKHRLLKNHKIQLNPTFSRYTMQTRLPFMEKTFQIHNSNKGCPSGKVPIRMI

SEQ ID NO: 282075 - protein, 102 aa, Glycine max
  unsure (1)..(102): unsure at all Xaa locations
  Clone ID: PAT_MRT3847_96735C.1.pep
SSSTTNNILYSFISFKHISSPGGCPFSVEGQIHYLKNILIKIIDPSSSILQIYPSDFEIDINRKQFLLHVVFQLPFITXKKFILSTCKLQTTLTVEEHFLNN

SEQ ID NO: 282076 - protein, 47 aa, Glycine max
  Clone ID: PAT_MRT3847_96736C.1.pep
YLRHSVSNSHVVRSSHKFSSIPSQCSPCMHKSLHFCRNSGSLWDINC

SEQ ID NO: 282077 - protein, 95 aa, Glycine max
  Clone ID: PAT_MRT3847_96737C.1.pep
IWGMIQKKKLLDLGSHHKLIHVHQRISFVFSSLFLIFFRAICSWPARIFIQLVHRSCHQLIIYHSAILHHHQLVPSQVLVTVLLHFINQIHLCDP

SEQ ID NO: 282078 - protein, 97 aa, Glycine max
  Clone ID: PAT_MRT3847_96738C.1.pep
ARVMLEFPRGFFCLKDPGSLGVHLSIFASAGGGFIFFPKINYSFASFCAHGPLFWGAFPPLFFEFFLVDLSHFKPGWTLGFCFFFKEIKIFKTFKVN

SEQ ID NO: 282079 - protein, 123 aa, Glycine max
  unsure (1)..(123): unsure at all Xaa locations
  Clone ID: PAT_MRT3847_96739C.1.pep
HASATVLSAPAHHGGAPPSSPVNLADPPPSLPPTSPEPPPGGPALSPHXSSPRLYYPPQAPPYHAESPSSSNSQQPQQPRASSSTSPPVRGASEDPPAPAPRVTHQNPPLHKAPPTVPCFLPT

SEQ ID NO: 282080 - protein, 116 aa, Glycine max
  unsure (1)..(116): unsure at all Xaa locations
  Clone ID: PAT_MRT3847_9673C.1.pep
MGGRVEGILPDLPRLNSAGKQLEDGRTLVDYNIQKESTVNLELQWRGGMHIVVXTGTGMTISLQVESTHTIDSVKAYIHDKEGLPPDQQRHIFAWKHLEYGITLADYIIQQASTLH

SEQ ID NO: 282081 - protein, 68 aa, Glycine max
  unsure (1)..(68): unsure at all Xaa locations
  Clone ID: PAT_MRT3847_96740C.1.pep
PVFKGFQVNXNIMDLAGSKAFFXMHCLPPEKGVQVTDKVIKAPNSIVFPQNKNRMHAQNAVMLHVLGK

SEQ ID NO: 282082 - protein, 55 aa, Glycine max
  Clone ID: PAT_MRT3847_96741C.1.pep
TSLFLMRSTRIYISQIILKQQMLAIFSPPPFKHHLVDQSQSQNNLSIYPYGSLAK

SEQ ID NO: 282083 - protein, 161 aa, Glycine max
  Clone ID: PAT_MRT3847_96742C.1.pep
TRPPTRSPTRPLSANHQRFLATGIRVASSSNCTKDNEKSHLEPPTRNAQQVSAKIPPHQVPSFTSSWAVDDLLELTAFESPEKKESLQFGELEWLTDVGIFGEQFAQEALAAAEVPQLPVTHNSSSVASYRTSKSYMSHKKPRIEVLNDDDDEYFTVPDLG

SEQ ID NO: 282084 - protein, 238 aa, Glycine max
  Clone ID: PAT_MRT3847_96743C.1.pep
MKIQCDVCEKAPATVICCADEAALCAKCDVEVHAANKLASKHQRLLLQCLSNKLPRCDICQDKPAFIFCVEDRALFCKDCDEPIHLASSLSANHQRFLATGIRVALGSNCTKGHEKGNMEPSNPNAQEVPVKTPSQQVPSFTSSWAVDDLLELTDFESPDKKQSLEFGELEWLADAGLFSEQFPHEALVAAEVPQLPVPHTSSVASHKAPKSLVSYKKPRIEVLDEDDDEHCTVPDLG

SEQ ID NO: 282085 - protein, 46 aa, Glycine max
  Clone ID: PAT_MRT3847_96744C.1.pep
LRRAKGTLAFKAHTFYFARPKKAELIFKDMDFLSSFFPFTMLYKKK

SEQ ID NO: 282086 - protein, 96 aa, Glycine max
  unsure (1)..(96): unsure at all Xaa locations
  Clone ID: PAT_MRT3847_96745C.1.pep
LGRRCVRVLHIQGRAMXNQIGSMFSDVVCAVHGIDSKERYPGDNELHLERVNVYYNDTSCRTFVPRAGLMALETETMDSDRSGSYGEIVRPGNSVF

SEQ ID NO: 282087 - protein, 79 aa, Glycine max
  Clone ID: PAT_MRT3847_96746C.1.pep
SFLFPPVVHEAPPSPLIYHYEGQMPAIVPNVVALFLQIVCHTCIDEYCVALLQICHTIFPQHASAIVILYIVPKVPDSG

SEQ ID NO: 282088 - protein, 53 aa, Glycine max
  Clone ID: PAT_MRT3847_96747C.1.pep
DNIKSITSKTYFPFHAQLPHEQGFYIGLCAVNLPFMLLFLITVLISLVVLHLM

SEQ ID NO: 282089 - protein, 79 aa, Glycine max
  Clone ID: PAT_MRT3847_96748C.1.pep
GVWCKHTPYINVTLCPHISQSIYLTTFSVTPIDHHSTTHSTKLIIYYSTPNLITNNVVVVVVVDNTLPNHHYFANHPIF

SEQ ID NO: 282090 - protein, 81 aa, Glycine max
  Clone ID: PAT_MRT3847_96749C.1.pep
RRVATFGMVLMKLDLRQESSRWAESIDAITMYLDMGMYSEWDDSSKLDFLPRATPGTPSLVPPSNSERFEECAAREVKEET

SEQ ID NO: 282091 - protein, 88 aa, Glycine max
  Clone ID: PAT_MRT3847_9674C.1.pep
HAYKTRCGIIGSTQSVCKESIVWLGFSVNVVYYGHNKCWSVVIVSWFIGSFFFGQSFQSHPSYVTVVLPQIGFYDPQGTNHSVYQSRY

SEQ ID NO: 282092 - protein, 45 aa, Glycine max
  Clone ID: PAT_MRT3847_96750C.1.pep
KQLNAFGFKGEPIQGFNFRAHTMLPKNFQASSNVPGDLSTVLPKI

SEQ ID NO: 282093 - protein, 493 aa, Glycine max
  Clone ID: PAT_MRT3847_96751C.1.pep
MECSQFSVFLLLSIFVGICLASTEEQERDRIAKLPGQPENVLFAHYSGYVTVNEEAGRALFYWLVETPASIEPSSRPLVLWLNGGPGCSSIGYGAAEEIGPFRINSDGNSLYSNPYAWNNLANILFLDSPAGVGFSYSNTTSDLYTAGDQRTAEDAYTFLVNWFERFPQYKHRDFYIAGESYAGHYVPQLSQLVYRRNKGIENPVINFKGFMVGNAVIDDFHDYIGTFEYWWVNGLISDSTYKKLGIACDFYSSEHPPENCVEALELATLEQGNIDPYSIYTPVCNDIAAIKRRLGGRYPWLSRAYDPCTERYSTLYFNRPEVQKALHANVTGIPYSWAGCNDVIVENWGDSPLSMLPIYQELIEGGIRIWVFSGDTDSVVPVTASRYSIRALNLSTIINWYAWYDNDEVGGWSQVYEGLTLVTVRGAGHEVPLHKPRQGFILFKTFLEDKNMPLPIDRSLSGPTDKSLNKNIRLARPIRKITMPSSTQGFTY

SEQ ID NO: 282094 - protein, 40 aa, Glycine max
  Clone ID: PAT_MRT3847_96752C.1.pep
FGSKSKYMFGKVTIQLKLVEGDSAGTVTAFYVSGNFIFFF

SEQ ID NO: 282095 - protein, 89 aa, Glycine max
  unsure (1)..(89): unsure at all Xaa locations
  Clone ID: PAT_MRT3847_96753C.1.pep
MPNPKVFFDMTIGGQSXGXIVMELYADXXPRTAENFRALCTGEKGVGRRXSPSIQGLVFHRVIPXSFMCQGGDFTXGNGTXXSRXWRQV

SEQ ID NO: 282096 - protein, 56 aa, Glycine max
  Clone ID: PAT_MRT3847_96754C.1.pep
DSPFYISQISWKFSFFSCSLCSKYNFSLEWKLILTPILTELQKYQETLQISFLFLG

SEQ ID NO: 282097 - protein, 48 aa, Glycine max
  unsure (1)..(48): unsure at all Xaa locations
  Clone ID: PAT_MRT3847_96755C.1.pep
SKSGXETKPNTKKYRFXANXRIXHSXXIIFXXXXLAAQTHNIISGEKK

SEQ ID NO: 282098 - protein, 115 aa, Glycine max
  Clone ID: PAT_MRT3847_96756C.1.pep
PTRPPTRPILSESLYAFLFFNRVSFITHKVFSFFLLSHRTSKPKLNTLCIVTKYIIGRLRVAISIIYPHYKKANPYALFLLCSTPLLCYLPLHPSTHTHSSIMRNPYSATKTFLF

SEQ ID NO: 282099 - protein, 52 aa, Glycine max
  Clone ID: PAT_MRT3847_96757C.1.pep
SIQFTAEGVKSGSYLQSLSVVEKLGIFLFTHWLSFSLACLSIRYNIQTKKAS

SEQ ID NO: 282100 - protein, 40 aa, Glycine max
  Clone ID: PAT_MRT3847_96758C.1.pep
IDVANIHKKKEKEKAVEELKAKAQQKGSFGRLGAPKMGKK

SEQ ID NO: 282101 - protein, 327 aa, Glycine max
  Clone ID: PAT_MRT3847_96759C.1.pep
RFGYIKRAMHGTKMLSTRAVSEMYGRELVDLRKESRWEFLNTLFSVSEAVAYMQMVDRLDDETIPADLALDYKGLYKAVGKALFWAHVEGRLKSEIMSKPELFVEPDPELPLALLDQKEAGKKLLLITNSDYLYTDKMMQHSFNRFLPNDMGWRDLFDIVIVSARKPEFFQTSHPMYEVVTGEGLMRPCFKAQTGGLYSGGSAQMVENSLDIHGDEILYVGDHIYTDVSQSKVHLRWRTALICRELEEEYDALIGSRSYRESLVELINQKEIVGDLFNQLRLALQRRSKDRPAQTLAATNLNDEDLTDSMQKLLIVMQRLDEKIAPM

SEQ ID NO: 282102 - protein, 82 aa, Glycine max
  unsure (1)..(82): unsure at all Xaa locations
  Clone ID: PAT_MRT3847_9675C.1.pep
MKKKSKKKKKTSGGGRVPNSPYRELNNARXLAVVXQRRDWKNLGVTKLNRLEENPLFASWGNSKKARTDRLSKQLRSLNGKW

SEQ ID NO: 282103 - protein, 115 aa, Glycine max
  unsure (1)..(115): unsure at all Xaa locations
  Clone ID: PAT_MRT3847_96760C.1.pep
GIASSRILGTIPHWGXHQTVWNQMATERTPLNXDSSKQSFGQVYIDLLGGXILGDKTGDRITLIQNSSISNLLRVAACKKGCTMVKIAMSRNASPKKSDCSSLVQSAVTNSSSSH

SEQ ID NO: 282104 - protein, 122 aa, Glycine max
  unsure (1)..(122): unsure at all Xaa locations
  Clone ID: PAT_MRT3847_96761C.1.pep
MGVPTHVGPALRFFPPGVTPPGQGTPGGFARVNGGKNQSCPPFFKGLGVFPGPPFFFFREGPLXGRVAGFGKGGPLGGISRGPGGGAPFLFFSPPPFFFLFLGSAPPPPVFLPFLERALFFF

SEQ ID NO: 282105 - protein, 237 aa, Glycine max
  unsure (1)..(237): unsure at all Xaa locations
  Clone ID: PAT_MRT3847_96762C.1.pep
LXSGSFDRTIKIWNVEDRTYMSTLFGHQSEILSIDCLRKERVLTAGRDRSMQLFKVHEESRLVFRAPASSLECCCFVSNDELLSGSDDGSIELWTVMRKKPIYILRNAHALLVDSMKSDQKDSEKLPNGNLENGYNHPENHHCLSVFSWVSAVSVCRNSDLAASGAGNGSVRLWEIESDTKDIKSLYNVPLAGFVNSLAFAKSGEFLVAGVGQEPRLGRWGRNPEARNGVSILTYEM

SEQ ID NO: 282106 - protein, 159 aa, Glycine max
  Clone ID: PAT_MRT3847_96763C.1.pep
TPRPPGGPLFFLVLPLKSFGSGNEIFEQKAPPSNPQKKKFFTEGPKIGAFSKNPQKKSRSHPQYPGGKSQPKNGSGGKNPRKKKRQHRGSGKRGARNPNFWRGKKGEKPPLFEGEEQCFGKTPGGILPKLFKGGGLFPGGQRTQPQFQAYLPGDEKEKL

SEQ ID NO: 282107 - protein, 91 aa, Glycine max
  Clone ID: PAT_MRT3847_96764C.1.pep
RKSCCYNTINLHPNRDSTIMLLLGGWVGVSILKKQQKFFILKLHEEPQLVLMISKSATWRQTLTYNCMSCMVYCEQCQSMKKNHLPNINEG

SEQ ID NO: 282108 - protein, 82 aa, Glycine max
  Clone ID: PAT_MRT3847_96765C.1.pep
DAWVFFFFHSRTSTSFCEEGTGRPDLWGAKKVLRDLPNLQMTYGYPREAFFFNDDGGTNISHHATCSATTNGVFPTFSFPPS

SEQ ID NO: 282109 - protein, 86 aa, Glycine max
  Clone ID: PAT_MRT3847_96766C.1.pep
MSSSQRAWIVAASVGVVEALKDQGVCRWNHTLKSAQHVIKSHVGSFSQAKNLSFSSSMVSTSSRLKGKQSEESLRTVMYLSCWGPN

SEQ ID NO: 282110 - protein, 251 aa, Glycine max
  unsure (1)..(251): unsure at all Xaa locations
  Clone ID: PAT_MRT3847_96767C.1.pep
MEAEGQWQISEREICWSVVFIATCSIIILLYVKLWYRPQRIRSVLQKQGINGPKPSFPFGNISEMQQLPNQLAPVSLEALDEWAYSIFPYFHTWRQLYGPMFMYSTGTNEHLYVETPELVKWIGMHKSLHLGRPSYLTKTLKPLLGNGIIRSNGLHWAFQRNLLAPEFFHSKIKNWVDIMEESTMAINKKWENHITESEGGIAELVIDGDMKALTADVISKAXFCSTYAQGNLIFAKLASMQTALAKPNHI

SEQ ID NO: 282111 - protein, 94 aa, Glycine max
  unsure (1)..(94): unsure at all Xaa locations
  Clone ID: PAT_MRT3847_96768C.1.pep
MHAYVSSEFGSSFAPDWLRGKAKVXQXTIQRLLEENDQLIRCIVEYQNKGRANECVQYQHVLHRNLIYLATIADANTSSLTKAWSSLPGGCDEH

SEQ ID NO: 282112 - protein, 69 aa, Glycine max
  Clone ID: PAT_MRT3847_96769C.1.pep
GSALVMELGAKLQHRTDHRYLLLPVRDKERKQINTFLAHTQNRCQSIRAVILDQSRNNPRFCRETNGYY

SEQ ID NO: 282113 - protein, 191 aa, Glycine max
  Clone ID: PAT_MRT3847_9676C.1.pep
MKKPNTSTSGSPKLDRKTIERNRRIHMKSLCFKLVSTIPSNDLKPTKDMLSQQDQLDLATTYIKRLKERIEKLKGEKEKIMNMMMSSNQNNNSIFNIGSQLPLLEIKDLGSGIEVMLISGLNKNFMLYEVISVLEEEGAEVVTANFSTVADKIFYTVHAQVKISRVGVEPPRVYQRLQELIAPLEIWEYIP

SEQ ID NO: 282114 - protein, 48 aa, Glycine max
  Clone ID: PAT_MRT3847_96770C.1.pep
GRDYISKNMNIVIIISYFHIEAISISNGANIILFNDCLTYLAFFVQLP

SEQ ID NO: 282115 - protein, 66 aa, Glycine max
  Clone ID: PAT_MRT3847_96771C.1.pep
GDRPRSGIFILTKQWLDPCLKKVLVSQRCKNQSRQSLQSRSGMYFVACSSKRLSMLIMISGSGKYY

SEQ ID NO: 282116 - protein, 80 aa, Glycine max
  unsure (1)..(80): unsure at all Xaa locations
  Clone ID: PAT_MRT3847_96772C.1.pep
MFSWLARLVSSCLRPVRRYARMSKDGDDDDDGVDESTSSVEDSLLWRRDLLKHSCGEFSFAVVQANEVIXEDHSQVEIGS

SEQ ID NO: 282117 - protein, 91 aa, Glycine max
  Clone ID: PAT_MRT3847_96773C.1.pep
TGPPFFFFCFLGGSFFFVRAFFFFFLRFVFVAVLLNFFGKYSNINPKKFKRQAIKLKEMKGTTQNRMSRKDKLENSRIRTTHNKNPKISLC

SEQ ID NO: 282118 - protein, 54 aa, Glycine max
  Clone ID: PAT_MRT3847_96774C.1.pep
ARRDYELFQLLLLNNNMRNEEWRGMRTEKGVSEMKSVNDVTDVDFEINVFEFCF

SEQ ID NO: 282119 - protein, 116 aa, Glycine max
  Clone ID: PAT_MRT3847_96775C.1.pep
MATWTSFFPTASVRSIIFQKQNPPKALLLLSQQRSFASSASYATLKLPRRPLLSKGRTPLVRAATIEEIEAEKAAIEKDAKSRMDRTIDNVRTNFSSIRTGRANPAMLDKIEVEYY

SEQ ID NO: 282120 - protein, 85 aa, Glycine max
  Clone ID: PAT_MRT3847_96776C.1.pep
SDSVVAACGIHSVIDVAVNHTVLDPYRLGDIQRLNHYSITRIRRQDQVCVSIEREIERAQMEAVERGIKRESGTVKVESSSRIGS

SEQ ID NO: 282121 - protein, 73 aa, Glycine max
  Clone ID: PAT_MRT3847_96777C.1.pep
FKDVLMITKMITKDDDKGDDKKLKGQSKNEFKIFKIESRILQDSRGKLNSRFKRSRFKRSRFKRSRFKNQEKA

SEQ ID NO: 282122 - protein, 43 aa, Glycine max
  Clone ID: PAT_MRT3847_96778C.1.pep
ISQYLKVKELVFDYEECTNRLKCLWYCETLVNEHSSKVFFQFA

SEQ ID NO: 282123 - protein, 64 aa, Glycine max
  Clone ID: PAT_MRT3847_96779C.1.pep
TRAGCIHSVYAAISSTSTQQAEEGLYIWLYFLALHNFLNQKSHTRGRAYPTSFITQLQQCLCLT

SEQ ID NO: 282124 - protein, 93 aa, Glycine max
  Clone ID: PAT_MRT3847_9677C.1.pep
TILILYYVDDFPHKNCKEMFKILGIYKKRENKDLISCSIHYNYFPVMCLRNCRCYLWRERVVEKEENTQKSLPVSLPFSYYSGNVLRDPSLLA

SEQ ID NO: 282125 - protein, 128 aa, Glycine max
  unsure (1)..(128): unsure at all Xaa locations
  Clone ID: PAT_MRT3847_96780C.1.pep
VXENFFFFFFFFFFFFFFFFFLRGGSPAINQLLDFRTRLAKIPKDHFSKGGKLFQKINLFNPPLVLFWEKGCIPFLFATGVLQPGPYRPIYYWGTLPKKGSIGIPLLFGTRISNHFDLFELREFFLSP

SEQ ID NO: 282126 - protein, 199 aa, Glycine max
  Clone ID: PAT_MRT3847_96781C.1.pep
TNGEFPISSFFSSMSSFNPFSPPPPTPYLTNLGFGYSIAIALGVLFLLSTLILSSYLCCRTLRHRNNNRHTPRNNTSDGIVLPRVIFVAEDDDDDATRQNDAVTGLDQAVINSYPKFPYVKEGDYDSTCSICLCEYKDSEMLRMMPECRHYFHLCCLDPWLKLNGSCPVCRNSPMPTPLSTPLQEVVPLSQYADARARR

SEQ ID NO: 282127 - protein, 98 aa, Glycine max
  Clone ID: PAT_MRT3847_96782C.1.pep
GRRYFTKSNSECDATLSSASGASLLTYVRHGSYYVHLGLMPKWVAARTALLVTQPNCKVPEDVIIINLHTVTLVWTVADAKNKIGCGDRSWSRGGGCC

SEQ ID NO: 282128 - protein, 61 aa, Glycine max
  Clone ID: PAT_MRT3847_96783C.1.pep
SSRKLYKMYQGEGGSASTQSIQGIRPLKSMTKNDTMNLKDPFLKSNSNYKVQPTARNHKLR

SEQ ID NO: 282129 - protein, 93 aa, Glycine max
  Clone ID: PAT_MRT3847_96784C.1.pep
ARENPDPPPHTDRSSLAWQSLGTELSVLSKSVLLWTVMTKHHGSPKPWHSTCLLPRKPAGLPFRSRTIPPHAKHEIKRPKLMPRLLRLIRLWL

SEQ ID NO: 282130 - protein, 74 aa, Glycine max
  Clone ID: PAT_MRT3847_96785C.1.pep
LKNKNDWSPKLIDVLIIRTRELMVSNLELYRRLLIWDIVCESTSRPIDLKDQRTDCIDVLVRLNVHGYNHMMIC

SEQ ID NO: 282131 - protein, 154 aa, Glycine max
  Clone ID: PAT_MRT3847_96786C.1.pep
ASVVGGEIYDPAIKQAGTKLSVVVNGELYAFDPSNSVDSGRIKVYDQGEDAWKVVRRKVPVYEFTELEYPYLLEGFHGKLHFITKDANHDISVLQADLCSNLDSSQSTSTPQSPKSMEDELLQESTETDEVIWKLVASKGFGQAELINCQVIDI

SEQ ID NO: 282132 - protein, 99 aa, Glycine max
  Clone ID: PAT_MRT3847_96787C.1.pep
MDSATSKHICRDWEMFNTLKIDGEFSHFKLGNREKIRVEGIRSMRMKLYDGAIQTFSNVRFVPSVVVNIIFMREITPQGYKYVGSKWRCKVYKGRHLVL

SEQ ID NO: 282133 - protein, 45 aa, Glycine max
  Clone ID: PAT_MRT3847_96788C.1.pep
LFDGMSIPHINSFLHMIIEEHYSRELGIWKISWLCKVDSLWLSIH

SEQ ID NO: 282134 - protein, 50 aa, Glycine max
  Clone ID: PAT_MRT3847_96789C.1.pep
SGIYISRMCGSTIMVYNSFVKTNAVFIYRYETFKYHLVEEAYEILRGMSQ

SEQ ID NO: 282135 - protein, 109 aa, Glycine max
  unsure (1)..(109): unsure at all Xaa locations
  Clone ID: PAT_MRT3847_9678C.1.pep
SSPRVTNEAVQKAAAALKGSNHHHTTNVXTRLDSQQKKLNLPILPTTTIRSFPQTIELRKIRPEFKTNKISXKEYMKSINNKIRKVIELQEKLDINILVHGEPERSDVV

SEQ ID NO: 282136 - protein, 446 aa, Glycine max
  unsure (1)..(446): unsure at all Xaa locations
  Clone ID: PAT_MRT3847_96790C.1.pep
RNPAQGHVNPLMTLSQKLVEHGCKVFFVNTDFDHKRVVSSMVEQLDSLDESLLKLVSIPDGLGPDDDRNDLSKLCDSLLNNMPAMLEKLIEDIHLKGDNRISLIVADVCMGWALDVGSKLGIKGALLCPSSAAFFXLLYNVPRLIDDGIIDSDGGLRTTTKRTIQISQGMPEMDPGELFWLNMGDTINGKIVLNYLMQCTQRLTMTEWWLCNTTYELEHAPLSSIPKLVPIGPLLRSYDDTIATAKTIGQYWEEDLSCMSWLDQQPHGSVLYVAFGSFTHFDQNQFNELALGLDLTNRPFLWVVRQDNKRVYPNEFLGCKGKIVSWAPQQKVLSHPAIACFVTHCGWNSTIEGVSNGLPLLCWPYFGDQICNKTYICDELKVGLGFDSDKNGLVSRMELERKVDQILNDENIKSRSLELKDKVMNNIAKAGRSLENLNRFVKWLKE

SEQ ID NO: 282137 - protein, 101 aa, Glycine max
  Clone ID: PAT_MRT3847_96791C.1.pep
KHRDRVGTQSCPYMWGCKDIPGGLLAKPQYMCGVLSVVIRHPNTMAPACVTNINVHFVVLCIPHGSFSVAKYSRGLSTWWHDQVKLSGAIEIIFFWVGERR

SEQ ID NO: 282138 - protein, 37 aa, Glycine max
  Clone ID: PAT_MRT3847_96792C.1.pep
AITGARGEPSPNCQLTSRLVYEPRTLGPSLAVVNRQS

SEQ ID NO: 282139 - protein, 68 aa, Glycine max
  Clone ID: PAT_MRT3847_96793C.1.pep
LEAHIRAETQFPVPSNMTRKINSYKQKTKTTENICASQTDSSIIHGIKRLLTIQNIINNHAHKEKPEA

SEQ ID NO: 282140 - protein, 122 aa, Glycine max
  Clone ID: PAT_MRT3847_96794C.1.pep
EGENVQVAEIEKNSEQNKLDKQKDLNDNERERMLVPEIEMSDRHNEQNNEVTEKLEISADPLQAMLFDMIPSLATQKVEQPMNRSVREEKLPETSNAEAEPMTTKKKKVSYKDVASELLKDW

SEQ ID NO: 282141 - protein, 66 aa, Glycine max
  Clone ID: PAT_MRT3847_96795C.1.pep
LSLSLSLSHTHTQRNALFNNIPSLMPFPFSCPLQLPTPTDTFPQLSHAHGHYSYLSPLLVPFILLT

SEQ ID NO: 282142 - protein, 266 aa, Glycine max
  unsure (1)..(266): unsure at all Xaa locations
  Clone ID: PAT_MRT3847_96796C.1.pep
LETELVYNGNAPREAYATILHSAHVYVCGAIAAAQSIRMSGSTRDLVILVDETISSYHRSGLEAAGWKIRTIQRIRNPKAEKDXYNEWNYSKFRLWQLTDYDKIIFIDADLLILRNIDFLFGMPEITATGNNATLFNSGVMVVEPSNCTFQLLMDHINEIESYNGGDQGYLNEIFTWWHRIPRHMNFLKHFWIGDEEEKKQMKTLLFGAEPPILYVLHYLGVKPWLCFRDYDCNWNADIFHEFASDVAHAKWWKVHDAMAELLQQV

SEQ ID NO: 282143 - protein, 28 aa, Glycine max
  Clone ID: PAT_MRT3847_96797C.1.pep
RNICHITKRRIAGLAGLLSSAYIIILFL

SEQ ID NO: 282144 - protein, 67 aa, Glycine max
  Clone ID: PAT_MRT3847_96798C.1.pep
LSMVKDIEPCKTNDQLEIINRTFWKDIWSSKAMASLKKSKISNLSSFFYNFYLFHFVLLILTNSINH

SEQ ID NO: 282145 - protein, 78 aa, Glycine max
  unsure (1)..(78): unsure at all Xaa locations
  Clone ID: PAT_MRT3847_96799C.1.pep
NSTTGVSYIAACYVXFLESGGALVIPLIYNELPENLNKKLDLVYGVLFTGGRAVYGPYFETLGNIFKKALYKNDAGDH

SEQ ID NO: 282146 - protein, 95 aa, Glycine max
  Clone ID: PAT_MRT3847_9679C.1.pep
ILSALENTEQSLNWSTRLKIALGSARGLAYLHHDCCPKVVHRDIKSSNILLDENMEPRVSDFGLAKLLVDEDAHVTTVVAGTFGYLAPEYLTSGR

SEQ ID NO: 282147 - protein, 80 aa, Glycine max
  unsure (1)..(80): unsure at all Xaa locations
  Clone ID: PAT_MRT3847_967C.1.pep
MASTNPYDSMGDDAEDPSQLIARQTPKGGGCCCGCHRRSHEGASSVDXKPAHLPSTTLAACHAARDATNESVHVGRAGGL

SEQ ID NO: 282148 - protein, 49 aa, Glycine max
  Clone ID: PAT_MRT3847_96800C.1.pep
KRDTNTNHIEKGDDAEKLIKMRSLTKRKAIKKETSYNGYGSGFLLCLVS

SEQ ID NO: 282149 - protein, 70 aa, Glycine max
  Clone ID: PAT_MRT3847_96801C.1.pep
RPPVRLEGFNPFYIFKNAWDKLRISYLVTGDKTLLEGWAFLKEKNFEGVFQFTKAFVIASLRYPCTESMV

SEQ ID NO: 282150 - protein, 46 aa, Glycine max
  Clone ID: PAT_MRT3847_96802C.1.pep
ADIGLAMGIAGTEVSAMLCNVSLCEPFILPTKGKEKEMLCCYILVT

SEQ ID NO: 282151 - protein, 52 aa, Glycine max
  Clone ID: PAT_MRT3847_96803C.1.pep
CYRFMIRFHLGPLIYTNTSFIYLFRPNQFFNGNQLALPIVFMVQTTFQSKFP

SEQ ID NO: 282152 - protein, 177 aa, Glycine max
  unsure (1)..(177): unsure at all Xaa locations
  Clone ID: PAT_MRT3847_96804C.1.pep
GVFFFFFFFFFFFFFFFFFFPPPQGTGKFHILTNPTNSIPLGGDGKQPFNLFRGGPFGKRGKGKKNNEQPWGGGAPNQGGPKKKSQKNQRGKNKKAPPLLKKTKRALGPWSLGPGPPKGKKHAGFGKGPPKRGGPPTRETTPFGALEKRGLXPQKIPPPLFVGPPQPPLDPPGGTPP

SEQ ID NO: 282153 - protein, 34 aa, Glycine max
  Clone ID: PAT_MRT3847_96805C.1.pep
CNYSYIVFMTLFLINLIILGLYLIFLYFCISLFF

SEQ ID NO: 282154 - protein, 52 aa, Glycine max
  Clone ID: PAT_MRT3847_96806C.1.pep
MIIGIINTIRGIYIRTYVQIFININNNNNNNNNNNNNNNSKSNNNVHNTNDK

SEQ ID NO: 282155 - protein, 191 aa, Glycine max
  Clone ID: PAT_MRT3847_96807C.1.pep
YFRDQGMKSIQTGQPAPDPFGLLGLLSVIRMSDPDLTSLALGIDLTTLGLNLNSSENLHKTFGSPWTDESAKGDPEFTVPQCYFAKQPPALHQGYFSKFSVETLFYIFYSMPKDEAQLYAASELYNRGWFYHKEHRLWLIRVPNMEPLVKTNTYERGSYHCFDPSIFETVRKDNFVLHYEMLEKRPHLPQL

SEQ ID NO: 282156 - protein, 48 aa, Glycine max
  unsure (1)..(48): unsure at all Xaa locations
  Clone ID: PAT_MRT3847_96808C.1.pep
ARGRAGRVLVFVMGKEGVHGGGLTTKAYSMAKYLRDXWVLAARQTVKY

SEQ ID NO: 282157 - protein, 159 aa, Glycine max
  unsure (1)..(159): unsure at all Xaa locations
  Clone ID: PAT_MRT3847_96809C.1.pep
DIRSGNLGVVXLMQHKYTSELACMLYLERCHRIEEYVDRQIIDHXTLPCPNLIXLREAGLTSSHLGIVIVIPAEGELFEMICQAGRFNKHXGRYFFQQIISCVSSWNFLLFWHRYLXLDITLLDGIPGPLAQNXESGYYKTSLLYSRPMSTVGTPSYFG

SEQ ID NO: 282158 - protein, 125 aa, Glycine max
  Clone ID: PAT_MRT3847_9680C.1.pep
VLILHTSKLRAFINSTVYGPDLNLPSITISKLNQSRIVQRTVQNVAQNESYSVGWTAPYGVSVKVSPTHFCIPSGESQVLSVLLNATLNSSVASFGRIGLFGNQGHVVNIPLSVMVKISYNTTTS

SEQ ID NO: 282159 - protein, 500 aa, Glycine max
  Clone ID: PAT_MRT3847_96810C.1.pep
MSLPACPAEQLAQLLGPNTTDASAAASLICGQFAAVDSKFVDTAFAVDNTYLLFSAYLVFSMQLGFAMLCAGSVRAKNTMNIMLTNVLDAAAGGLFYYLFGFAFAFGSPSNGFIGKHFFGLKDIPSSSYDYSYFLYQWAFAIAAAGITSGSIAERTQFVAYLIYSSFLTGFVYPVVSHWFWSPDGWASAFKITDRLFSTGVIDFAGSGVVHMVGGIAGLWGALIEGPRMGRFDHAGRAVALRGHSASLVVLGTFLLWFGWYGFNPGSFNKILLTYGNSGNYYGQWSAVGRTAVTTTLAGSTAALTTLFGKRVISGHWNVTDVCNGLLGGFAAITAGCSVVEPWAAIVCGFVASIVLIACNKLAEKVKFDDPLEATQLHGGCGTWGVIFTALFAKKEYVKEVYGLGRAHGLLMGGGGKLLAAHVIQILVIAGWVSATMGPLFWGLNKLKLLRISSEDELAGMDMTRHGGFAYAYEDDETHKHGMQLRRVGPNASSTPTTDE

SEQ ID NO: 282160 - protein, 36 aa, Glycine max
  Clone ID: PAT_MRT3847_96811C.1.pep
LIHIHQPITNLSSLPQIIHPQYAYLYPDQGHQYSQG

SEQ ID NO: 282161 - protein, 70 aa, Glycine max
  Clone ID: PAT_MRT3847_96812C.1.pep
TLISCPHNSVTHDTFAMMPSPTVMRQGNTINAASVTERRYGGLLEQRPRDSLSERGRELPSDRGSKQRCG

SEQ ID NO: 282162 - protein, 62 aa, Glycine max
  Clone ID: PAT_MRT3847_96813C.1.pep
SSLLYIWIVSVICCTLFFIFFFPSFKFMTIRKSHITCLNSQGAAYISVGQLQLVPIGFKLKS

SEQ ID NO: 282163 - protein, 170 aa, Glycine max
  Clone ID: PAT_MRT3847_96814C.1.pep
MFDIFFGWSKASKCKKAIKRARCRLRLLKNKRQAIARQLRKDLAELIQSGHEETAFNRVEQLMGDESLTAAYELLDHFCEFILTQLSYIQRHKDCPNDINEAVSSLIFASARCGDLPELGVIRKLFGQRYGERFATAAVELSPGNLVNKQLKENLSVKSVPDDMKYRMGM

SEQ ID NO: 282164 - protein, 73 aa, Glycine max
  Clone ID: PAT_MRT3847_96815C.1.pep
VHRGISYHNMTRDVKIEPAWGRHHALLVLPIFYPPERCKAFLPSVVWQIHMYESVFFFFVRSKTPMINHPRFR

SEQ ID NO: 282165 - protein, 51 aa, Glycine max
  Clone ID: PAT_MRT3847_96816C.1.pep
LHCSFSNFIFQLTCMVYFDNGVAFQSRMLCLVCVAVPNLVNFFIGKRYLIG

SEQ ID NO: 282166 - protein, 56 aa, Glycine max
  unsure (1)..(56): unsure at all Xaa locations
  Clone ID: PAT_MRT3847_96817C.1.pep
AHKSSDIDLYQVPLCAHSLLSISVQIEGIKDTKYTYNSFPIWESSQNKKYTXMKNL

SEQ ID NO: 282167 - protein, 34 aa, Glycine max
  Clone ID: PAT_MRT3847_96818C.1.pep
ASAGASVDSARQNLAATCVNAFGNAGFGQDPLMT

SEQ ID NO: 282168 - protein, 47 aa, Glycine max
  Clone ID: PAT_MRT3847_96819C.1.pep
GGRVCVIHIVNKSKKNNVLCLIMFKSINCTGVILLPLIICLIELSSC

SEQ ID NO: 282169 - protein, 74 aa, Glycine max
  unsure (1)..(74): unsure at all Xaa locations
  Clone ID: PAT_MRT3847_9681C.1.pep
FVFFVLSQIGGXVGGGYFKGAKPFDIIYKPLRWEIQKLTYNRGLHIKKRAERNRRGMRKYEKRKFGPGTIFQAK

SEQ ID NO: 282170 - protein, 86 aa, Glycine max
  Clone ID: PAT_MRT3847_96820C.1.pep
TQNQDDREHAQVQSAKFRTLQQSDIRKLNNKKLKRKVKKVTSSLNWQQPHIPFSPFPVPRLKKRTQQNKTQKPKKKKTHELTHIPT

SEQ ID NO: 282171 - protein, 105 aa, Glycine max
  Clone ID: PAT_MRT3847_96821C.1.pep
FLGSDVAVIDLDLLCVMVMWCIHGRNYMVQVNNDVMRSGVADGGGNTWHTIGIGGHKWVDVLVHIGLATCNVGYNPSHVLNKAAGSRHKPSLEEDRGEHRPVLYI

SEQ ID NO: 282172 - protein, 88 aa, Glycine max
  Clone ID: PAT_MRT3847_96822C.1.pep
NRSYVLDSSLTTVLYPQKDLTLTHRRLKMKYKTIRLPIMQPRQLKPMPLLHQEKVTRPNGHRHINRLFHHTLRRQERGESHLAEKGTH

SEQ ID NO: 282173 - protein, 105 aa, Glycine max
  Clone ID: PAT_MRT3847_96823C.1.pep
QKRYYPYTSTCIQFSSDLIEFCNLQFPTMISDRCCEEGSHPCLSMSMIAKANFPLALLFYCFILHLPVACGYSSSYSALGSQFLVMKSKIKFSVALVAYVCCAFC

SEQ ID NO: 282174 - protein, 95 aa, Glycine max
  Clone ID: PAT_MRT3847_96824C.1.pep
KRYYSESDYFKQALRQGAPAKPRVPRIPRMPHLHDFQFFNNPRLNELYEKEVRYLMQANQKKDTIDGEDEDQLDALTAEEQEEKDNYRGGFASWT

SEQ ID NO: 282175 - protein, 45 aa, Glycine max
  Clone ID: PAT_MRT3847_96825C.1.pep
HKIQGNSVIIRKNVLDINITTTVKGVIATGINIIAGVVAHVTPLA

SEQ ID NO: 282176 - protein, 155 aa, Glycine max
  unsure (1)..(155): unsure at all Xaa locations
  Clone ID: PAT_MRT3847_96826C.1.pep
MDLNAESIWGCYKPPPQLGVGVSNSHSTLIGNLRYDYDKCRKWECCCLGVLAQRATTAVEDEGPSVPPLVDSSGAADGVHQNESKGFHKDLNLLPKPLTAIDISSYPRDGSKVRVAYQGLPGAYSEDAXLKAYPKCETVPCDNFEASFKADEIMV

SEQ ID NO: 282177 - protein, 51 aa, Glycine max
  Clone ID: PAT_MRT3847_96827C.1.pep
CYSTPNQTIDLFGKFKTNFQQLIVTQSLVPTYATMQRICKNKSCKIKNGGF

SEQ ID NO: 282178 - protein, 203 aa, Glycine max
  unsure (1)..(203): unsure at all Xaa locations
  Clone ID: PAT_MRT3847_96828C.1.pep
LNIFGIGFPPNLIDYRCFILLTNGDTLNCSSDIEVDDIRCPNIAEKDVSDEEIEAEELERRMWKDRIKLKRLKEKQKLEAQQAAEKQKPRQSSDQARRKKMSRAQDGILKYMLKLMEVCKARGFVYGIIPEKGKPVSGSSDNIRAWWKEKVRFDKNGPAAIAKYEADCLAMSEADNSRNGNSQSILQDLQDATLGXSLLSALM

SEQ ID NO: 282179 - protein, 88 aa, Glycine max
  Clone ID: PAT_MRT3847_96829C.1.pep
TRYLSLEPIRKAFKGTFIVAGGYDRSEGNLAISSSAADLVAYGRLFLANPDLPTRFQLDAQLNEPDATTFSTHDPVLGYTDYPFLQDI

SEQ ID NO: 282180 - protein, 117 aa, Glycine max
  Clone ID: PAT_MRT3847_9682C.1.pep
KKTKRGGKGNPDPIGIIFISNQHRERERHPQKLQRGGRGEEKEKEHPVPLPLTHIQGNWNGKGISKKKKIFVSPCPSPNWGRGGKVLFKAKGPGKGNPLYKNERGSGRAQTQIQAHG

SEQ ID NO: 282181 - protein, 123 aa, Glycine max
  unsure (1)..(123): unsure at all Xaa locations
  Clone ID: PAT_MRT3847_96830C.1.pep
TFPKTFISNSPCLILTIPLTSPGTLSNYPGGVSIPNSNTYLFYHXFLIYFYINFVPYFYFLFYYSYLLFFTIFXFSIIIFLFILIFLLIFLNLFIYFFHIFIIFLFFILLLSFFFLYFLLFIN

SEQ ID NO: 282182 - protein, 69 aa, Glycine max
  Clone ID: PAT_MRT3847_96831C.1.pep
KKNKNCIAWQHRFLLFLLYLQLQFKLMINEFAFQVLHVRSQLQFLKRCQESRVDEDLGAPLSYHDLPHF

SEQ ID NO: 282183 - protein, 75 aa, Glycine max
  Clone ID: PAT_MRT3847_96832C.1.pep
RVLGVRLRPDLAAEVTDWQPVIDMSHPVHPPANTPSAPAQHDVDRHSYFSFRLGCQSTDCCGDGQRRIRQPCFWR

SEQ ID NO: 282184 - protein, 64 aa, Glycine max
  unsure (1)..(64): unsure at all Xaa locations
  Clone ID: PAT_MRT3847_96833C.1.pep
VVGWAFSVLLSDSFFYRCEFHCCRCFLIPFPFFPFCVQRCGFVSVPLVFLAAGVGWGAPGXPAR

SEQ ID NO: 282185 - protein, 154 aa, Glycine max
  Clone ID: PAT_MRT3847_96834C.1.pep
GLLPREKNAMSVSFLSMLLRAAIYLETTVACRLDLEKRMALQLGQAVLDDLLIPSYSFTGDTLFDVDTVQRIMMNFLQSEKEDRSPYNADDECFSPPQSDVYRVGKLMENYLAEIATDRNLAVSKFITVAELIPEQSRPTEDGMYRAIDIYLKA

SEQ ID NO: 282186 - protein, 51 aa, Glycine max
  Clone ID: PAT_MRT3847_96835C.1.pep
EKARPGEAPRADILTLAAEESGVLAQGTGGEKHHGKEDSLTAKRTRGKQNR

SEQ ID NO: 282187 - protein, 46 aa, Glycine max
  Clone ID: PAT_MRT3847_96836C.1.pep
PKKYKVQTIRLAHFALFDINQPKTIAKIACVLPEIECQENPQLTSD

SEQ ID NO: 282188 - protein, 93 aa, Glycine max
  Clone ID: PAT_MRT3847_96837C.1.pep
VPREEGLGKGKSVLSPFVTLYALVQCTRDLSEISCAQCLSIAVNNFPNFCSNRKGCRVLYSSCYVRYELYPFFFPLDSNKTGPSNTAKVSVYT

SEQ ID NO: 282189 - protein, 56 aa, Glycine max
  unsure (1)..(56): unsure at all Xaa locations
  Clone ID: PAT_MRT3847_96838C.1.pep
MLVYQDIHTGDELISGSLSCKEIEDGMMWEVEGKWVVKXAVDVDIGXNTSDEGGGE

SEQ ID NO: 282190 - protein, 150 aa, Glycine max
  Clone ID: PAT_MRT3847_96839C.1.pep
MSDEEHHFESKADAGASKTYPQQAGTIRKNGYIVIKGRPCKVVEVSTSKTGKHGHAKCHFVGIDIFTAKKLEDIVPSSHNCDVPHVNRTDYQLIDIAEDGFLSLLTENGNTKDDLKLPTDLCTEGYWAKELASIAGSLLFSFMQKLYIFV

SEQ ID NO: 282191 - protein, 102 aa, Glycine max
  Clone ID: PAT_MRT3847_9683C.1.pep
MSKSCSVLLFGFVLVLCLFSPTSATPPPAKVVTGVASNVVSALIKWLWPLSVKSTTKPGRVQHRRSMDKFESGYSVQTIFDRNQLGIEPHSVNISPNGEFLI

SEQ ID NO: 282192 - protein, 53 aa, Glycine max
  Clone ID: PAT_MRT3847_96840C.1.pep
TDYQLTDIAEDGFLSLLTENGNTKDDLKLPTDESLLTQIKDGFAEGKDLVVSD

SEQ ID NO: 282193 - protein, 60 aa, Glycine max
  Clone ID: PAT_MRT3847_96841C.1.pep
LSSSNLSLLLIYVAQHRLMQGVISSLDTHCEVQSSLIFSLSHWITSIKTRIKCFLIIIIS

SEQ ID NO: 282194 - protein, 97 aa, Glycine max
  Clone ID: PAT_MRT3847_96844C.1.pep
LCYDSRRVLNLLLITYLAISLANIIPYTSDRAKANIVEPQPSACTADRSPDCATTCKLIPFRTGHSFDLHPFEPRYTLMIRRINIPHNRMCKAHSDG

SEQ ID NO: 282195 - protein, 66 aa, Glycine max
  Clone ID: PAT_MRT3847_96845C.1.pep
NKILIEARSGDKSGCSDLCTEYIRKETLFDHKQMLNVHFQQLKLENGEEKWMIKFIYLIMKSPKKL

SEQ ID NO: 282196 - protein, 77 aa, Glycine max
  Clone ID: PAT_MRT3847_96846C.1.pep
QRKEQPNPQVAFLYTLLCTLYSAESSSQRGKRGFSSTLVREYKIHLCPPKGIVGCSSIYREINHLHAHKITHSVQQR

SEQ ID NO: 282197 - protein, 78 aa, Glycine max
  Clone ID: PAT_MRT3847_96847C.1.pep
SLYLFATAAPKPPNTRTQYPLLPKKKKKGYHTLLSLLKLLTPSIYMQNTNTTTLLTHRQETLFQFGDDNTHTHTYIYI

SEQ ID NO: 282198 - protein, 51 aa, Glycine max
  Clone ID: PAT_MRT3847_96848C.1.pep
CSRSQFHKPGCFFFQKFYSQCLCVPPGYYGNKNVCPWFNIWKPKEGGPQGP

SEQ ID NO: 282199 - protein, 39 aa, Glycine max
  Clone ID: PAT_MRT3847_96849C.1.pep
LEFKKINLFNSPIRLPGFKILSPGILFYFLCSKITHFRN

SEQ ID NO: 282200 - protein, 72 aa, Glycine max
  Clone ID: PAT_MRT3847_9684C.1.pep
AAPPARARADYDSLFLLRHIGDSGAGHSCPPLPFSDGSFPTSCLPTIGIEVTTTTTELEAARPKSAICDTDG

SEQ ID NO: 282201 - protein, 118 aa, Glycine max
  Clone ID: PAT_MRT3847_96850C.1.pep
MASAVLANRNEPNWPKHRVGGAGFMGKVPFSNPNPKSKSNPKLANSKRTLSASDDASSINRRSNDFVTFSQYVSFNIASYTNKEINDLKDRLTSELERTQRIRNRIESGDLQPGQSFN

SEQ ID NO: 282202 - protein, 388 aa, Glycine max
  Clone ID: PAT_MRT3847_96851C.1.pep
MSIFSRLRHYSTTSILSPNSSTPLTSKQKTRSAIHLLKSETNPERILDICRAAALTPDSHIDRRAFSLAVSKLAAAHHFAGIRTFLDDLKTRPDLRNEKFLSHAIVLYGQANMLDHAIRTFTEDLPSPRSVKTLNSLLFAALLAKNYKELTRIYLEFPKTYSIQPNLDTYNTVIKAFAESGSTSSVYSVLAEMDKNNIAPNVTTLNNSLSGFYREKKFDDVGKVLKLMEKYSVFPSISTYNVRIQSLCKLKRSSEAKALLEGMVCNGRKPNSVSYACLIHGFCKEGDLEEAKRLFRDMKRRGYLPDGECYFTLVHFLCCGGEFEAALEVAKECMGKGWVPNFTTMKSLVNGLAGALKVDEAKEVIKQIKEKFAESGDKWDEIEAGLPQ

SEQ ID NO: 282203 - protein, 173 aa, Glycine max
  Clone ID: PAT_MRT3847_96852C.1.pep
AFREVPQISGDARRALEICRRAAEIADYRVKKLISNPDCVTAGKGLVGMVDVEAAIQEMFQAPHIQMMKSCSRVGKIFLTAMVHELYNSGMGETTFEKLAMRVSCFCTSNGEVFPGYDTLLQIGCRLGECRIILCEAGAKHKLQKLQLNFPSDDVAFALRDCKDLPWLSKYLM

SEQ ID NO: 282204 - protein, 64 aa, Glycine max
  Clone ID: PAT_MRT3847_96853C.1.pep
NTIQKKLNVSSTQLLYQSAPFQAAILFVSGPVVDQMLTKQNVFAYKYSPVVLVIFNPHHVLYLN

SEQ ID NO: 282205 - protein, 214 aa, Glycine max
  Clone ID: PAT_MRT3847_96854C.1.pep
MSNIWPNTVELGYIKHPRGALQPPCRGLRPQQPSFAKKESPTYGKYEVEKIYQTGWEITTASSKLAECPETILNLRKQLKALASSARVAIFDKVVSTTNTMANPTQKKNLIKRSSLRNQMQAEDEAKGGMHKSVQTEETKSDKDVQRPPLLQSETEKSLPSPKSLTSEQHDRSKTTGSLAIVPGKKQIGFGFLRKLLSRRKKGRGKGTKLLAKA

SEQ ID NO: 282206 - protein, 85 aa, Glycine max
  unsure (1)..(85): unsure at all Xaa locations
  Clone ID: PAT_MRT3847_96855C.1.pep
LEPNRLEEDDRRGNLCILFITDSASAYWRQRPKYFEMARTKQTARKSTGGKAPRKQLATKAARKSAPTTGGVKKXHXYRPWTVPS

SEQ ID NO: 282207 - protein, 143 aa, Glycine max
  Clone ID: PAT_MRT3847_96856C.1.pep
AGRRIFKDRSVTSRSRAVALWSRPTSVQQNNHLIENQQQKTGELHTQKWGGRQRGQVTDPGMPVQPLKGGPKAKYGGPFTSWDREKPRGTPLNAWKKPPLARWQKGRGPPNALPQLPTPKAKGTRPEGAIKAGGGGGYPPGGP

SEQ ID NO: 282208 - protein, 65 aa, Glycine max
  Clone ID: PAT_MRT3847_96857C.1.pep
RKMALYTLHREVMLPVLNHFDRKLELIQHLQLQQFQLLHPQVLHINPMATSGHDSGGAISHRMCT

SEQ ID NO: 282209 - protein, 86 aa, Glycine max
  Clone ID: PAT_MRT3847_96858C.1.pep
PIPPFFAFPKPLKQKLLISLPPSSAAPTAINGFIHRPPKCCYFLPINQRKKKSYNSFFLPNQTKSLLLNFFHPYIKILLFILENIK

SEQ ID NO: 282210 - protein, 158 aa, Glycine max
  unsure (1)..(158): unsure at all Xaa locations
  Clone ID: PAT_MRT3847_96859C.1.pep
LDILANKVKAIRRLRELLTXKLPLGTFPVKVAIPIVPTIRVLVTFTKFEDLQPAEEFSTPPSSPAYFQDAKSKESEGSTSWISWMKGSRGTQSSDSDSHKFKDEMDPFSIPSDYKWVDANERKRRMKAKRAKSKKHKKQTVAKGGDGMQLGSDDVEEY

SEQ ID NO: 282211 - protein, 78 aa, Glycine max
  Clone ID: PAT_MRT3847_9685C.1.pep
PQGLGRHVLAQVSFPFGSQQGSHQNQVRGIGPITSRGGFRISLMVHDRFSLSLEVWPLFQHTSGGAHSKIHFFVQAGA

SEQ ID NO: 282212 - protein, 66 aa, Glycine max
  Clone ID: PAT_MRT3847_96860C.1.pep
LHSISSFSNCLLLMFLTSGTLSLGTAMGHPGNHPNAGRGTTDRVHNDPTLRALGSTGPRTTTSFHP

SEQ ID NO: 282213 - protein, 51 aa, Glycine max
  Clone ID: PAT_MRT3847_96861C.1.pep
SKLLKSFFPSFPCPRACIIVIFPQLPSSSRSLGRAVQLGLKVSFFLRDSPI

SEQ ID NO: 282214 - protein, 39 aa, Glycine max
  Clone ID: PAT_MRT3847_96862C.1.pep
TQKVKNDLHVKQLKKSNLGLVNHSLSRNNLRFKISIKIL

SEQ ID NO: 282215 - protein, 72 aa, Glycine max
  Clone ID: PAT_MRT3847_96863C.1.pep
KRHLFSFRTPSNISQSSVIEKYLPYIPSDQNNVAHNREETRLKGKHDAYHHVLAHINLSTALCGFKETYDTD

SEQ ID NO: 282216 - protein, 109 aa, Glycine max
  Clone ID: PAT_MRT3847_96864C.1.pep
YLLTHKIIRNFFNPSTFKQCMHFRIHHIEIINVTQYIVMRILMQNCNAHGECVTCRAKHVVPKNWHGNLECHTCEVRVAKAPKFELPIGTTIHYSQLTKAGADISTDDA

SEQ ID NO: 282217 - protein, 67 aa, Glycine max
  unsure (1)..(67): unsure at all Xaa locations
  Clone ID: PAT_MRT3847_96865C.1.pep
CXCFCMLEXFLVNYFWXLXRXFGFNCXXXXXXDDYKHSPDDSTXXQXLXLXXXXIXGPLXIXPWGFX

SEQ ID NO: 282218 - protein, 453 aa, Glycine max
  Clone ID: PAT_MRT3847_96866C.1.pep
LSTSASVSAGALLLRWGGFALLGLRAPRAPPPCHGPPEANSARQSYYPNFLSSVANAISAKSMFHVFYSPRASHADFAVPYQKYIKSIKNPVTIGTRFKMKFEMDESSERRLTFSDRTGMSDLDPYKWPKSKWRCLMVRWDEDIEISHQDRVSPWEIDPSSSLPPLSIQSSRRLKKLRPGLQAATPSHLTTGGSGFMDSEESVRSSKVLQGQENTGFMSLYYGCDKVTKQPEFEIRSPSHPNLASTGVRKISAAEFMRVHPSSFAGFSETNMFPRVLQGQEICPARSLTGKADLNFGSWGKPNVSYSNNNLHQATKPSFHSLGPEVIQTAYFPYGDIHNAGQGSSILCSKPTNFQRENIPFNTPSTQSGIMRNEVGRSDITIPNEQKLQDNISGTASLGANMRIPKDDNFKGQVKACKLFGISLSGETTAQNLQNSAKRSCTKVSDDSNRVIL

SEQ ID NO: 282219 - protein, 57 aa, Glycine max
  unsure (1)..(57): unsure at all Xaa locations
  Clone ID: PAT_MRT3847_96867C.1.pep
MSCCGGKRCCCSSCKCWKGCGRCMMYPDLSYSVSSXSADTLVMGVGSVNVQFEGAEM

SEQ ID NO: 282220 - protein, 47 aa, Glycine max
  unsure (1)..(47): unsure at all Xaa locations
  Clone ID: PAT_MRT3847_96868C.1.pep
XTXSQRXLNXEGTSGGLXXXLLHAYLYRXGRLLEXMGXEXXVSERXN

SEQ ID NO: 282221 - protein, 303 aa, Glycine max
  Clone ID: PAT_MRT3847_96869C.1.pep
MEVAVAKALKPSLRREFIVQQMLCEDIFSLNANTVAAGEDFSVDDLFDFSNGSLHNEQQQEYDEGKQSLSASEDRGEDDCNSNSTGVSYDSLFSTELAVPAGDLEDLEWVSHFVDDSLPELSLLYPVRSEEANRFVEPEPSAKKTPCFPWEMKITTKARTVRNRKPSNSRMWSLGSPLLSLPSSPSSPSSCSSSVREPPAKKQKKQAQVQPVGAQIQRRCSHCQVQKTPQWRTGPLGAKTLCNACGVRYKSGRLFSEYRPACSPTFCSDIHSNSHRKVLEIRKRKEVAEPDTGLAQTQMVPTC

SEQ ID NO: 282222 - protein, 118 aa, Glycine max
  Clone ID: PAT_MRT3847_9686C.1.pep
LVPALRCSALSNSHSENHDEATVVGFEVPKSPDSSYNNVYPGNEDEARDPPMVPSHLQHTLLNYPANRDTAGTVPLPKNVILNHLYIENRESPRSVVALGFTHRFPSKYVTILLSNAV

SEQ ID NO: 282223 - protein, 294 aa, Glycine max
  unsure (1)..(294): unsure at all Xaa locations
  Clone ID: PAT_MRT3847_96870C.1.pep
MEVAVAKALKPSLRSEFIVQKMHCEDIFSLNANTVAVGEDFSVDDLFDFSNGSLHNEHQQECDEEKQSLSASSQSQDRGEDDSNSNSTGVSYDSLFSTELAVPAGDLEDLEWVSHFVDDSLPELSLLYPVRSEEANRFVEPEPSVKKTPRFPWEMKITSKARSVRNRKPNTRVWSLGSTLLSLPSSPPTKKQKKRAEAQVQPVGVQIQRRCSHCQVQKTPQWRTGPLGAKTLCNACGVRYKSGRLFSEYRPACSPTFCSDIHSNSHRKVLEIXKRKEVAEPDTGLAQTQMVPTC

SEQ ID NO: 282224 - protein, 147 aa, Glycine max
  Clone ID: PAT_MRT3847_96871C.1.pep
IYVSSLQLLCGFPFLFFFTEMEVAVAKALKPSLRREFIVQQMLCEDIFSLNANTVAAGEDFSVDDLFDFSNGSLHNEQQQEYDEGKQSLSASEDRGEDDCNSNSTGVSYDSLFSTELAVPVTLSLSLSLSLSLSLGLLLFSNPNFVF

SEQ ID NO: 282225 - protein, 119 aa, Glycine max
  Clone ID: PAT_MRT3847_96872C.1.pep
MEVAVAKALKPSLRSEFIVQKMHCEDIFSLNANTVAVGEDFSVDDLFDFSNGSLHNEHQQECDEEKQSLSASSQSQDRGEDDSNSNSTGVSYDSLFSTELAVPVTLSPFVPISISNFVF

SEQ ID NO: 282226 - protein, 91 aa, Glycine max
  Clone ID: PAT_MRT3847_96873C.1.pep
GSSNTYLGPAHFNTTQIKFLAGAKLSPIHFLDIDNMDRVTLPAWKKKTTHRYNSRLTIERSHIHVTTGCTEEERLPQAFGLTPWIPRCPRR

SEQ ID NO: 282227 - protein, 81 aa, Glycine max
  unsure (1)..(81): unsure at all Xaa locations
  Clone ID: PAT_MRT3847_96874C.1.pep
QHKAGYCLFKLXSNSLFLSASLPEVKMAQETFLFXSESVNEGXPEXALXQISRXXLKCRXXXXXXTXRXXXXXGXNKXXXX

SEQ ID NO: 282228 - protein, 33 aa, Glycine max
  Clone ID: PAT_MRT3847_96875C.1.pep
PSQTGLTLLYLRLNNAYPLPGQLFGKLTTYCCY

SEQ ID NO: 282229 - protein, 76 aa, Glycine max
  Clone ID: PAT_MRT3847_96876C.1.pep
MSGTYESFKTLEKVKAVRQAMCWAANVAPAGRGQERAAVSLGSRRPSPAARSQGTQETSAHTPTGALPSWYLVWWP

SEQ ID NO: 282230 - protein, 76 aa, Glycine max
  Clone ID: PAT_MRT3847_96877C.1.pep
SVIIMKKYAITLIRIQALGFILGILHNFFQKHARPFKLNHMILDWIRELYTPLLVVEGGKIKRIRMSLMNDLFYLD

SEQ ID NO: 282231 - protein, 109 aa, Glycine max
  Clone ID: PAT_MRT3847_96878C.1.pep
FLISKLALVFCLLKMIFTLCRNSTVSRGSLSWQARPSRAADNQANPLSYLCSNRLPLRAGEPAASPRPRFSQDPHIRHSSLFSKEHTMAAVFLSFSSSSFKAFSLSFSF

SEQ ID NO: 282232 - protein, 96 aa, Glycine max
  Clone ID: PAT_MRT3847_96879C.1.pep
GDDRFCVPTVSHLFFRPNRPINRISFPKATLKNDRFLLDLSFYNLLGIPESGSLTEIKNSYKLLPRKYHPDVSPSGLFQEYTKRFIHVHEAYETLS

SEQ ID NO: 282233 - protein, 193 aa, Glycine max
  Clone ID: PAT_MRT3847_9687C.1.pep
MAPRDSRATALIGPGPSLSPAHKEIRYRGVRKRPWGRYAAEIRDPGKKTRVWLGTFDTAEEAARAYDTAAREFRGAKAKTNFPTPSELILNNNNINARSPSQTSTLDSSSPPPPPPLDLTLTPLSSAVFPVARPVLFFDAFARADTMVAVSRRETCGFERPAADFRRGDSDSDYNRRILLDLDLNVPPLPEVA

SEQ ID NO: 282234 - protein, 153 aa, Glycine max
  unsure (1)..(153): unsure at all Xaa locations
  Clone ID: PAT_MRT3847_96880C.1.pep
STPSRRSGKWGSSPRPSAPSRVLSTRPTPLPQSPTPSPPSXPAPAPPXPTTSSSMTPALPPLPSPPPPPSPLPEAETPSTPRTSSPPHSLLRCRLLRTPAGLPPAAPATVGTSRGTAPAESWRRRRFPRRIRLDRDEGGEPCARERVDYGRGE

SEQ ID NO: 282235 - protein, 137 aa, Glycine max
  Clone ID: PAT_MRT3847_96881C.1.pep
KAQNKMSKRTVEQQRQQQNMQKKHNKLEQFRSKLDQIESELMEVSDQLKDQLARNDQFRKGKGEIEKMPIEREGENRLIKERIFVNAAKMEQNHAQLRQNQKEVNYEFAEIIKFFDIWLRESQTHFASSPLLRQRKI

SEQ ID NO: 282236 - protein, 76 aa, Glycine max
  Clone ID: PAT_MRT3847_96882C.1.pep
PSKPNQNCPGRDIDYYLPYSLHHASKPRLAYLKNAGKGSFIKNLQSPCWCLENIPTLSCLKIDFDLNQGIKFPLAT

SEQ ID NO: 282237 - protein, 59 aa, Glycine max
  Clone ID: PAT_MRT3847_96883C.1.pep
AWVPFGGGFFDGFGYKRLLACFGSVSRRVLFLRFYVFRSRWLFVHQHLGPARLPRDWNR

SEQ ID NO: 282238 - protein, 67 aa, Glycine max
  Clone ID: PAT_MRT3847_96884C.1.pep
MEADFVTSDMLTLTQDAFYANDNDDVAVEGERCGICMDMVIDRGLLDCCQHWFCFVCIDNWATITNL

SEQ ID NO: 282239 - protein, 86 aa, Glycine max
  Clone ID: PAT_MRT3847_96885C.1.pep
QQSITNERPSIQYVCAAMKPSVTIHSYALSSVKSLDKGLWFCLCNAPLSLACLTILSSSCLFKHWFISQTVDQFIFTACKLSFMRY

SEQ ID NO: 282240 - protein, 57 aa, Glycine max
  unsure (1)..(57): unsure at all Xaa locations
  Clone ID: PAT_MRT3847_96886C.1.pep
SSRRSLSPQYLQXXPSQGSLPADVLLSQDRPRCGPYARPPFLMDPNLEGTLVDTTXG

SEQ ID NO: 282241 - protein, 125 aa, Glycine max
  Clone ID: PAT_MRT3847_96887C.1.pep
GKTFFLLFSRGTIVGGGLPGFPRRRFFTPPPFFKRDSSPPLRLVCQEQRGGGGVLNIFFWPPFFWAAVIFFPKGGGASTQQVVLWGRTFGGKPVRQRVFFPFFFFPLRPEVFFGKPPGGIFFPPP

SEQ ID NO: 282242 - protein, 120 aa, Glycine max
  unsure (1)..(120): unsure at all Xaa locations
  Clone ID: PAT_MRT3847_96888C.1.pep
YKCSHCLATPKMFALFVVAVVLEAWPCCAAGYCKVSSLAKENLAYGGSVFPVVHCACFRLAAVASASEQFDSMPDWRVKPSGGFLIGEXWRSDDSPLIQQACFVASARDAHYLDVFIFAI

SEQ ID NO: 282243 - protein, 72 aa, Glycine max
  Clone ID: PAT_MRT3847_96889C.1.pep
GSRSYAACFIYIVRATHRSVVIGCIEPKPAPPVHLSGFNYHTLAAGRTVWRFIFHVTSCWRSQSICTSSGRL

SEQ ID NO: 282244 - protein, 115 aa, Glycine max
  Clone ID: PAT_MRT3847_9688C.1.pep
SKKVAWQFIMRIRHLVNRPSFIFEMDARTSAVTYDGNWRVQSRGHSGPLSGVKVRPKILICLLRSPLGLYLCVPLNLTTDAITTGRRRLLFCGHRQNYRESLTLFLYPTWPLLTE

SEQ ID NO: 282245 - protein, 67 aa, Glycine max
  unsure (1)..(67): unsure at all Xaa locations
  Clone ID: PAT_MRT3847_96890C.1.pep
MQXGXXAGESXXATXXNIGASAKAGMAKTXXTVXEKASXMTARDPVSXXVGXPKXXXSMXQAXXHKX

SEQ ID NO: 282246 - protein, 188 aa, Glycine max
  unsure (1)..(188): unsure at all Xaa locations
  Clone ID: PAT_MRT3847_96891C.1.pep
MWRLKIADGGKDPYIFSTNNFVGRQTWEFDPEAGTPEERAQVEAARQNFYNNRFKFKACGDLLWRFQILRENNFKETISSVKIEDGEEITYEKVTATMTRAAHYLCALQTSDGHWPAQIAGAMFFVPPLVFCMYITGHLDSVFPEEYKKEILRYMYYHQNEDGGWGLHIEGHSNMVXYCTNYICMRVL

SEQ ID NO: 282247 - protein, 82 aa, Glycine max
  Clone ID: PAT_MRT3847_96892C.1.pep
MWRLKIADGGKDPYIFSTNNFVGRQTWEFDPEAGTPEERAQVEAARQNFYNNRFKFKACGDLLWRFQILRENNFKETISSVK

SEQ ID NO: 282248 - protein, 618 aa, Glycine max
  Clone ID: PAT_MRT3847_96893C.1.pep
EEYKKEILRYMYYHQNEDGGWGLHIEGHSNMFCTALNYICMRVLGEGPNGGHDNACARARKWIHDHGGVTHIPSWGKTWLSILGVYDWYGSKPVPPEFWVLPSFLPMHPSKIWCYCRLTYLPMSYLYGKRFVGPITPLILQLREELFTQPYEKVNWKKARNQCAKEDRYHPHSLIQDLVWDSLYIFIEPLLTRWPFNKLVREKALQVTMKHILYEDENSRYITIGCVEKALYMLACWVEDPNGDAFKKHLARVPDYLWVSEDGMAMQSFGSQGWDASLVIQALLATNLMEEIGPTLAKAHDFIKKTQVKDDPLGDFKSMYRHISKGSWTFSDQDQGWQVSDCTAETLNCCLLLSILPSEIVGEKMEPQRLYDSVNILLSLQSRKGGLAAWEPSGTQEWLEILNPTEFLGNIVVEHDYAECTGSAIQALVLFKKLYPRHREKEIKNSIANAVQFLEDTQTANGSWYGSWGVCYIYGTWFALRGLAAAGKTYTNCAAIRKGVKFLLSTQKEDGGWGESYLSCPKQIYVPLEGSRSTVVHTAWALLGLILAGQAERDTTSLHRAAKLLINSQLKEGDWPQQELTGVFNRTCMLHYPMYRNIYPMWALAEYRRLVPLPSTEV

SEQ ID NO: 282249 - protein, 75 aa, Glycine max
  Clone ID: PAT_MRT3847_96894C.1.pep
CFRPSSESASRLHELLIPLHLCLSPSVSISLFNSKLNKNFAKSLQASMVMTDLQIHKPSKRSRESDERKMGFYHG

SEQ ID NO: 282250 - protein, 55 aa, Glycine max
  Clone ID: PAT_MRT3847_96895C.1.pep
DPGANFWAYTHPLLPTRLFRGPKKFSNRPFRTPLAWSLTPFFVNRARLLLLFSSG

SEQ ID NO: 282251 - protein, 97 aa, Glycine max
  unsure (1)..(97): unsure at all Xaa locations
  Clone ID: PAT_MRT3847_96896C.1.pep
ASATLTSSLLISITGEPPXPTXIXFKLFNRWNFEDIXVTDISLADYIGVSASKHATYVPHTAGNYSFKLFMKAQCPIVXKLTNSLIMHGRNNCKKLF

SEQ ID NO: 282252 - protein, 44 aa, Glycine max
  Clone ID: PAT_MRT3847_96897C.1.pep
NPTRNFCSAVKLIITPRGTEPSKMRHKHNTKDQPEPGEEVEWGA

SEQ ID NO: 282253 - protein, 174 aa, Glycine max
  Clone ID: PAT_MRT3847_96898C.1.pep
DKPASMQIFPLSSPYLSFTTFYFTSPIVFFFFFSESNSKHQHATKAEEAQQPSSINIPNFPHTSNSTLLQNTKHSLGFVQRETLGSFQISFFFILLSYLIYRWRSKMVSNASKKKAAAVMAATSSKAADKVANGITDMQISDRTYTSRDIRVSNPNRNRELSDIIRFFFIVSRA

SEQ ID NO: 282254 - protein, 47 aa, Glycine max
  unsure (1)..(47): unsure at all Xaa locations
  Clone ID: PAT_MRT3847_96899C.1.pep
IVTCLRWGNDVSPPGRGPPPXSXLGRQSGXKHWMVQGISXFPPSIXF

SEQ ID NO: 282255 - protein, 74 aa, Glycine max
  unsure (1)..(74): unsure at all Xaa locations
  Clone ID: PAT_MRT3847_9689C.1.pep
IQERITLLNIPGQCINIKVCHILIVLMYRAIVSYFFLFSSVLSYVSCYFHLFLIFNVKNIYFXFIIISIKINFX

SEQ ID NO: 282256 - protein, 86 aa, Glycine max
  Clone ID: PAT_MRT3847_968C.1.pep
WNLPWEMTTVRHEERGFFFFFFSLPCSRPFTLPTACWVPAPIKGGSTTPPVRRDHLASSAPAPGVAHFSILSRPSPWQLWLAFRSF

SEQ ID NO: 282257 - protein, 52 aa, Glycine max
  unsure (1)..(52): unsure at all Xaa locations
  Clone ID: PAT_MRT3847_96900C.1.pep
VPKVHRVACSATDKEAWVVQLGVAMYPIRPPRRSNLGXRDCFNXFAFSASKT

SEQ ID NO: 282258 - protein, 245 aa, Glycine max
  unsure (1)..(245): unsure at all Xaa locations
  Clone ID: PAT_MRT3847_96901C.1.pep
LIVYALRCFYYFRDKSRSSKQRSAPELKEQEKLEFSGPERVTKSSCSSTSPRGIPELYEEKGHNLRDFSFTELKRATSDFSRLLKIEKVGLGSVFKGTIKPADGNRNSVLVAIKRLNKNALQGHKQWLTEVQFXLGVVQHPNLVKLIGYCALDDERGIQRLLVYEYMPNKSLEFHLFNKAYDPLPWKTRLEIILEAAQGLSYLHEELEIQVSFIATCLYIIPASLTKWSYIYIYIYIYDHSCAIT

SEQ ID NO: 282259 - protein, 274 aa, Glycine max
  unsure (1)..(274): unsure at all Xaa locations
  Clone ID: PAT_MRT3847_96902C.1.pep
LWGDRIGLVSYGETMGRNEWHGTEVAVKKLLYQDISDLKNSKLEKIEATNVDILFMGAVSKXRLSIVSEFLPRGSLYRLIHRPNNQLDERRRLRMALDAARGMNYLHNCTPVIVHRDLKSPNLLVDKNWVVKVCDFGLSRMKHSTFLSSRSTAGTAEWMAPEVLRNELSDEKCDVFSYGVILWELSTLQQPWGGMNPMQVVGAVGFQHRRLDIPDNVDPAIADIIRQCWQTDPKLRPTFAEIMAALKPLQKPITVSQVHRLIAQSSRIAEDPAG

SEQ ID NO: 282260 - protein, 50 aa, Glycine max
  Clone ID: PAT_MRT3847_96903C.1.pep
AEVKVAPFSHACSLVSPLDGCLGVSFKFGEMDYVAKVHDLAQASSSSQNL

SEQ ID NO: 282261 - protein, 105 aa, Glycine max
  Clone ID: PAT_MRT3847_96904C.1.pep
KLLFALTIGKMATQLPGRLEEPLLPPQNHWCPKSWTLCLEFKLAVLLNQTKTFLFVETNNFFLPIIQPFLNVRHFFFLKLSWNVYPMGPNCQKKWPFNKSFLWGV

SEQ ID NO: 282262 - protein, 60 aa, Glycine max
  Clone ID: PAT_MRT3847_96905C.1.pep
TFLTDTPIKMHFLLHYNLKIQFIHGVKKYKGFDSDLSTTCGSKNNSNLGENKYFIRSRAE

SEQ ID NO: 282263 - protein, 43 aa, Glycine max
  unsure (1)..(43): unsure at all Xaa locations
  Clone ID: PAT_MRT3847_96906C.1.pep
QVFEAMLXANIQXXVXHAXXXILTQVLKNCYKISTSTSTLLRF

SEQ ID NO: 282264 - protein, 72 aa, Glycine max
  unsure (1)..(72): unsure at all Xaa locations
  Clone ID: PAT_MRT3847_96907C.1.pep
SLFLFXYLASISVSLHADTITCYMFATQLETVIVSVIHVTIISADDRRSFTPSAPRAPIVTPLKYVGNTNIC

SEQ ID NO: 282265 - protein, 171 aa, Glycine max
  Clone ID: PAT_MRT3847_96908C.1.pep
MEVRQTVMVPPGYQSSVMGEKRVTINVPGMMDENEGGSGGKRTKSKGQKGNVVINGGNEGVTVVEHAGGDWNQMPGGHGHGPPNESPPRHQYPPHYHAPASPVYTGTYHTAYPTVTRYGAAYYTSPQPYSYSHVYRCVGSESDSETYTSPSPPSCSFELFSDENPNACFIM

SEQ ID NO: 282266 - protein, 55 aa, Glycine max
  Clone ID: PAT_MRT3847_96909C.1.pep
YKIKVQCKDIQSHTHTKYNTKVRKLIILIYNCLNLINWIETSFFTPTFYYLILIC

SEQ ID NO: 282267 - protein, 53 aa, Glycine max
  unsure (1)..(53): unsure at all Xaa locations
  Clone ID: PAT_MRT3847_9690C.1.pep
VIMGKXKTHIQHCRSLGHVDSGKFNXHWSLXYKLGGMTXCDXTVXXXGXQMNK

SEQ ID NO: 282268 - protein, 63 aa, Glycine max
  unsure (1)..(63): unsure at all Xaa locations
  Clone ID: PAT_MRT3847_96910C.1.pep
XXXXXPXXXXXVXXWCLXXVGXVFXXVXCVXVFFFRKIIFTLSHPIAMSNYCCTRSWXNLQNX

SEQ ID NO: 282269 - protein, 58 aa, Glycine max
  unsure (1)..(58): unsure at all Xaa locations
  Clone ID: PAT_MRT3847_96911C.1.pep
VQTKNGTVSVASAFAGHNEAVRRRHRLLLRNAVEEAYRGVDXEDGGPCGAIIGSTDEI

SEQ ID NO: 282270 - protein, 308 aa, Glycine max
  Clone ID: PAT_MRT3847_96912C.1.pep
MESALIFLGTGVSGTVPSMRCLIDPSDPPCLVCTQSLSLPPHLNPNYRCNTSLLIDYYSQSDATHKYILIDAGKTFRETVLRWFVFHHIPRIDSILLTHEHADAVLGLDDIRAVQPFSPTNDIDPTPIYLTRHSMDSMEKVFPYLVQKKHKEGQEIRRVAQCCWNIIADDCNLPFSASGLKFIPLPVMHGEDYICLGFLFGEKDRVAYISDVSRIPASTEYVISKSGAGQLDLLILDTLKKTGSHNVHFCLPQALETVKRLCPKQTLLIGMTHEFDHHKDNEFLMDWSRREGLLVQLAHDGLRVPINL

SEQ ID NO: 282271 - protein, 100 aa, Glycine max
  unsure (1)..(100): unsure at all Xaa locations
  Clone ID: PAT_MRT3847_96913C.1.pep
MQALAQDQLRALLHMTKGLDIDLNIGIYDGDTSHNERMWLRDNSRLLITNPDMLHISILPHHQQFCRISSNLRXFVVIDETHTYKGAFGCHTAPLLSSSR

SEQ ID NO: 282272 - protein, 76 aa, Glycine max
  Clone ID: PAT_MRT3847_96914C.1.pep
QCADLHNRDHALLKTVLVINLEVKDNHDEAAVGARLTLDLCREIEAAESWEESIDEIIAGFENKHRRKLLYSISFY

SEQ ID NO: 282273 - protein, 54 aa, Glycine max
  Clone ID: PAT_MRT3847_96915C.1.pep
IHIIPPPPQNIAGHPSKSINPKRVNTANLIHKLPPPGPGPSMKSPGGVWRPGKP

SEQ ID NO: 282274 - protein, 42 aa, Glycine max
  Clone ID: PAT_MRT3847_96916C.1.pep
THLYSNPVRMSKKDPGEKNPHWRFGFYWMCARIIRGPTRLLR

SEQ ID NO: 282275 - protein, 58 aa, Glycine max
  Clone ID: PAT_MRT3847_96917C.1.pep
ARTSSDEIVAIFHACLCSDYENPHMPVRCQLADWYMSDHESLMQPFTPFFVPCKRLCL

SEQ ID NO: 282276 - protein, 74 aa, Glycine max
  Clone ID: PAT_MRT3847_96918C.1.pep
GPCSEILHPCLFSEPHELCFRSCILHPKSLELCFMLTSEDPLVQSSILAFFFRSPMNYIFVHASSTQRVWSRAS

SEQ ID NO: 282277 - protein, 171 aa, Glycine max
  unsure (1)..(171): unsure at all Xaa locations
  Clone ID: PAT_MRT3847_96919C.1.pep
RVGGRVGENVLNFPSDALLPGPVSQIQQGSWEWNLFRNEIDLSKIDGDFSNRKVSIVYAVEHELASLNYSTSIFENGTEVPLRDELTQLDWDILREIEISEENEMFEVEEAEERREKGVXRWDDIYRNARNXKLKFEXQERDEGELERTGQPVCIYEIYNGAGVWPFWTMV

SEQ ID NO: 282278 - protein, 69 aa, Glycine max
  unsure (1)..(69): unsure at all Xaa locations
  Clone ID: PAT_MRT3847_9691C.1.pep
QHHYLTYLHLLNLAINAESTLGXXQLSSLRGLKYLMTLTWAKXXYFPVLLPTTIXKPPSLIKPPMPRPP

SEQ ID NO: 282279 - protein, 162 aa, Glycine max
  Clone ID: PAT_MRT3847_96920C.1.pep
MATELTVQSERAFQKQPHVFQNNKKQGGKTKRAGKGGRRWVKDVGLGFRTPRTAIEGNYIDKKCPFTGLVSIRGRILTGTVVSTKMHRTLVIRREYLHFIPKYSRYERRHKNLSAHVSPAFRVEEGDKVTVGQCRPLSKTVRFNVLRVLPRTGKAVKAFQKF

SEQ ID NO: 282280 - protein, 59 aa, Glycine max
  unsure (1)..(59): unsure at all Xaa locations
  Clone ID: PAT_MRT3847_96921C.1.pep
IFPCSILHSTHTRRILASILHYFCSLSLSXCFLFFLSDSVTPRKSINLVGLHVQNDGST

SEQ ID NO: 282281 - protein, 119 aa, Glycine max
  Clone ID: PAT_MRT3847_96922C.1.pep
KKKKKKKKKKKKKKKKKKKKNPKKKKKKKKKKKKRGRPPKRTKANEPGNAKKKLLKRATKIKLTGRRLKTKKREKPGRNQTKPPGKKTPLRKGGKNKKGPNQRPYQKKTKPKRKKEPPQ

SEQ ID NO: 282282 - protein, 54 aa, Glycine max
  Clone ID: PAT_MRT3847_96923C.1.pep
QVWLQGAQMNLIEPSQFVKWLETMPVPVDLLIASLNDPFHLTGLHKDSAFHPLA

SEQ ID NO: 282283 - protein, 79 aa, Glycine max
  Clone ID: PAT_MRT3847_96924C.1.pep
FFFFTHFFFYSLFFLLGPGFLIITFSFFLSFPSFQKTTNLLPTHTRTSKNHLPIRYIKTPHLCSLQNNNQKKLCSPLGI

SEQ ID NO: 282284 - protein, 61 aa, Glycine max
  Clone ID: PAT_MRT3847_96925C.1.pep
DFVRLIALWKEGEKKEKEEQERTVVFVGMNLTRIRFLWGYGNLMRGFNRERRSLKSHAKEQ

SEQ ID NO: 282285 - protein, 236 aa, Glycine max
  Clone ID: PAT_MRT3847_96926C.1.pep
EAVQGCTKTLTFQTDVLCNACGGSGVPPGTRPETCKRCKGSGVLFVQAGIFRMESTCGTCKGTGKIVSNYCKSCRGAKIVKGTKSVKLDIMPGIDSNETIKVFRSGGADPDGDHPGDLYVTIKVREDPVFRREGSDIHVDAVLSITQAILGGTIQVPTLTGDVVLKVRPGTQPGQKVVLKKKGVKTKNSYTFGDQYVHFNVNIPTNLTQRQRELIEEFAKEEQEECDKRRAASASG

SEQ ID NO: 282286 - protein, 203 aa, Glycine max
  Clone ID: PAT_MRT3847_96927C.1.pep
TFPLYLLISLDFPSLSPKSAGPKNVSLTSSTTESTPDLEDKDKLLGGLLTTGFDEASCISRMQSQLYRKASPHKPSPYLISKLRNYEDIHRRCGPNSRAYDRSMRKIVRSKNKGAAATLCKYLIWTPANGLGNQMISMAATFLYAMLTDRVMLVKFDKDKQGLFCEPLLNSTWVLPEKSPFWNEKHIETYQTMLEKDRNRTSN

SEQ ID NO: 282287 - protein, 427 aa, Glycine max
  Clone ID: PAT_MRT3847_96928C.1.pep
MIRSNGVRLLRSLPEKLLRHANERIYEGMCQWGYRTLSSGLCNPSRVIGNLSPNVGNGGNLKNYLLFGAANTYWGTSRSIHGSASLARDYYEVLGVSKNASSSEIKKAYYGLAKKLHPDTNKDDPEAEKKFQEVSMAYEVLKDEEKRQQYDQVGHDAYVNQESTNGFGGNSGFNPFEQMFRDHDFVKSFFHQNIGGEDVKTFIELSFMEAVQGCTKTLTFQTDVLCNACGGSGVPPGTRPETCKPCKGSRVLFVQAGIFRMESTCGTCKGTGKIVSDYCKSCRGAKIVKGMKSIKLDIMPGIDSNETDLYDRIGGADDDGFRSEDPNIHVDAILSITQAILGGTIQVPTLTGDVVLKIRPGTQPGQKVVLKKKGIKTKNSYTFGDQYVHFNVSIPNNLTERQRELIEEFAKEEQGDFDKQRVASASG

SEQ ID NO: 282288 - protein, 67 aa, Glycine max
  Clone ID: PAT_MRT3847_96929C.1.pep
STQVRDESDNSENFDEIGNRSRETKSSTTYDVANSEIITPKKVHNLDKTGKRGGRGRERARDDDARA

SEQ ID NO: 282289 - protein, 85 aa, Glycine max
  unsure (1)..(85): unsure at all Xaa locations
  Clone ID: PAT_MRT3847_9692C.1.pep
VFGLXRREXVRCPXRCEKSTEPYPFRGKXXXXXXXXQHERKFETKVEEKKGFGEXAELEGITRVVVGRECSKXEKQGRTRXKVEA

SEQ ID NO: 282290 - protein, 458 aa, Glycine max
  unsure (1)..(458): unsure at all Xaa locations
  Clone ID: PAT_MRT3847_96930C.1.pep
MLCSHGVTLINRLARRSFCHANDSVYQALFQKGYRALNSGPCSPSRVVGTFASNVGDAVNLKKWLLLGAANKYWGASRSIHGSASLARDYYDVLGVSKNASSSEIKKAYYGLAKKLHPDTNKDDPQAEKKFQEVSIAYEVLKDEERRQQYDQLGHDAYVNQQSTGFGGEGGFNPFEQIFRDHDFVKSFFHENIGGEDVKTFIELSFMEAVQGCTKTLTFQTDVLCNACGGSRSSSRSRAARADSXEGVPPGTRPETCRRCKGSGVTFVQTGIFRMESTCGTCKGTGKIVSNFCKSCKGTKVIKGTKSVKLDIMAGIDNNETIKVYRSGGADPDGDNPGDLYVTIKVREDPVFRREGSNIHVDAVLSITQAILGGTIQVPTLTGDVVLKIRPGTQPGQKVVLKKKGIKTKNSYTFGDQYVHFNVSIPNNLTERQRELIEEFAKEEQGDFDKQRVASASG

SEQ ID NO: 282291 - protein, 39 aa, Glycine max
  Clone ID: PAT_MRT3847_96931C.1.pep
PLEKFLRNRAQNPCSPKHKIFSVVFTYQKKHSIEVLSFQ

SEQ ID NO: 282292 - protein, 101 aa, Glycine max
  unsure (1)..(101): unsure at all Xaa locations
  Clone ID: PAT_MRT3847_96932C.1.pep
MYSMRKMMETVLLWPRLNADSVCIAQHGCIDXLAWMICAELHAEESIDSFIPDTVGTVAKKGNSGVTYATNQFFNNKNEQTSTAQIVDRKLTMCTLRNLSI

SEQ ID NO: 282293 - protein, 68 aa, Glycine max
  Clone ID: PAT_MRT3847_96933C.1.pep
VHNVAGASKNDLRAAIAKHASTVAAPFCSSSQVSYYEWTQNIMRFNFFKSVLNVFSMSLECGISSSHV

SEQ ID NO: 282294 - protein, 236 aa, Glycine max
  unsure (1)..(236): unsure at all Xaa locations
  Clone ID: PAT_MRT3847_96934C.1.pep
MGRARLLVSDFVLSFMWVWSGVLLRIIVFNHLGFAHGPLGEVIKTTFSIANMFFFAFLVKVTRGGAYNPLTVLADAISRDFNNFLYCAGARIPTQVVXSSVGVKLLIDTIPEVGLGPRLNVDIHRGALTEGLLTFAIVTISLGLASKIRENFFMKTWISSLSKLTLHILGSDLTGGCMNPASVMGWAYARGDHITKEHFLVYWLAPIEATILAVWTFKFLVQPGKEDKSTSKSKSD

SEQ ID NO: 282295 - protein, 105 aa, Glycine max
  Clone ID: PAT_MRT3847_96935C.1.pep
RIGVTVVVSSRAGDVVVLDVTPESIVAAAIIKLVGYRSLQSTSSLLAGVTIRSLTCWVALKSSLTLSGIACINGHVGQFASRSDGLYVPISPNAGGQGDRSQYIS

SEQ ID NO: 282296 - protein, 39 aa, Glycine max
  Clone ID: PAT_MRT3847_96936C.1.pep
LSASSDASSTSEEASSVVITQMLVVSSVRIFDFAPDLQP

SEQ ID NO: 282297 - protein, 80 aa, Glycine max
  Clone ID: PAT_MRT3847_96937C.1.pep
TSQTVSLFHLMVNGHPLICFSPEPELFWSAPLEQAPALHGEGSSSPAFSAEYRMWVSSRASNSLWWGSASFSRLFIYRPF

SEQ ID NO: 282298 - protein, 215 aa, Glycine max
  Clone ID: PAT_MRT3847_96938C.1.pep
RKINNNICNSEETRRESLADHSVRFWTNGGLLGLEPSKPPDFNKSTSLSQGSLSTKSETDGGSHHNSMQKSNGYKEEWESSEDVAEQILKEPSSRFLTSGHNDDQACISEKATGNSQQSNGFCQIERNNLGEIRVTAPESILPSILDTKDITEPNQGNGENSSRVFGLSRRLLINSFQRKVSFDEKSEHYNSLKSVILDQSGQNGIVGPSLPETT

SEQ ID NO: 282299 - protein, 72 aa, Glycine max
  Clone ID: PAT_MRT3847_96939C.1.pep
KPTDHVGLMNITPEETTVFVTNDTYAQVGLHLFDGNYTVPNGFVISHVDTYMTLYYLLGQCLFLIHWIPIMG

SEQ ID NO: 282300 - protein, 51 aa, Glycine max
  Clone ID: PAT_MRT3847_9693C.1.pep
IGAKGNIYNRMEKETDAKIVGCSIGSVKDFKLQLNRYLKPYPLKNVHLHAL

SEQ ID NO: 282301 - protein, 66 aa, Glycine max
  Clone ID: PAT_MRT3847_96940C.1.pep
VLTRLRGKHTHNNGGGITVHNPLRQLVEPKANQIFDENKRGGRKKMVRERFPCSHQCHRDDWPDTS

SEQ ID NO: 282302 - protein, 394 aa, Glycine max
  unsure (1)..(394): unsure at all Xaa locations
  Clone ID: PAT_MRT3847_96941C.1.pep
MDGGYFPPRKIGSWHGLELEDVQENDELKLVTSLSAIPQPPTPHEPMEFLSRSWSLSPAEISKALLEKQKHNFHDKNQATFPEAILAPQLVTSKIIPYPYSKKMGTIGKWFHQRHHGNTNITVKKKDRARLENARVHSAVSIAGLASALAAVAAAENSSCSQTKLKLALASATQLLASHCIEMAELAGADHDHVASTIKSAVDIQTPGDLMTLTAAAATALRGEAALRARLPNEAKRNASISPYDRVQLPQSHWFSAFEGQSCEHHPPCVGDLWQLTRKGVLRWKHVSVYINKKCQVKIKIKSKHVGGAFSKKNKCVVYGICDKDGAWPYSTSRKTSEEFYFGLKTAQGLLEFKCDSKLPXQKWVDGIGCLLRRVNSIEATERSLDLLSINSDT

SEQ ID NO: 282303 - protein, 110 aa, Glycine max
  Clone ID: PAT_MRT3847_96942C.1.pep
AFPSMHLSRHTVFEDSPPSHIVSLDHQLDMGGHVSRLVQSSRWFLQGMLSSSMHHPHSHLLPLQIHRYWFLSFHRVFNAGCPGMVSAPPQSCRACANMRQSLSILFISFE

SEQ ID NO: 282304 - protein, 128 aa, Glycine max
  Clone ID: PAT_MRT3847_96943C.1.pep
MLLVLSPYNLLIHCEAIINMENSSEKCNFEGNKELNASTITVGGIYDMLLDSINHEDTRSVVRLGRVDPTDNPLFRTTTVAVDAITRAVHSFNFNCYPPTVGLPEAKRAVADHLNSNLSHKIISPEKR

SEQ ID NO: 282305 - protein, 91 aa, Glycine max
  Clone ID: PAT_MRT3847_96944C.1.pep
MSLRECSPMAPLLEPSSLLLSHILSVLDGSTNAHLSTNYYEPTGAILHTIGKNAVQHAVNGEDILEASILRVHFHDCNEIGCNSPTLIERH

SEQ ID NO: 282306 - protein, 284 aa, Glycine max
  Clone ID: PAT_MRT3847_96945C.1.pep
KQRNHVTFIFNILIVYRRQKGDIIPLKLTNGTLTHSMLAFGCGYDQKHVGHNPPPSTAGVLGLGNGRASILSQLHSLGLIRNVVGHCLSARGGGFLFFGDHLIPYSGIVWTPMLQSSSKHYSSGPAELFFNGKATSVKGLELIFDSGSSYTYFNSQAHKALVDLVTNDLKGKPLSRATDDPSLPICWKGPKPFKSLHDVTSNFKPLVLSFTKSKNSLIQVPPEAYLIVTKHGNVCLGILDGTEIGLGNTNIIGDISLQDKLVIYDNEKQQIGWASANCDRSSLM

SEQ ID NO: 282307 - protein, 63 aa, Glycine max
  Clone ID: PAT_MRT3847_96946C.1.pep
KRVGFPPWGQFIFKGPLFFPPNALFFKSPMREIFFGRGSKIFGFFGAPWSVFFGAPKGESRPF

SEQ ID NO: 282308 - protein, 61 aa, Glycine max
  unsure (1)..(61): unsure at all Xaa locations
  Clone ID: PAT_MRT3847_96947C.1.pep
EELAGEVGTIASLALRLGQSDFSSSSLLFMXLDAGFYSYTAFCYLVTCMGLAIPWNITLVV

SEQ ID NO: 282309 - protein, 37 aa, Glycine max
  Clone ID: PAT_MRT3847_96948C.1.pep
LQGKLSIKCFQDSLRDLSNKNILWIAFLVNPTKNLIK

SEQ ID NO: 282310 - protein, 86 aa, Glycine max
  Clone ID: PAT_MRT3847_96949C.1.pep
DDPGLIIEDIDFSDKYLALIVREGRKVQLCSVGLPLPFGKGAVKLRKLDLQYLPIPRHVCQITPGPNYDFFSSVMRFIISSPVVCE

SEQ ID NO: 282311 - protein, 164 aa, Glycine max
  unsure (1)..(164): unsure at all Xaa locations
  Clone ID: PAT_MRT3847_9694C.1.pep
LFHPFFFSSFCLLLVKISPNPFLPKKKGAPPPSFLFSPPPTPPKFPTPLKTPPGGTRPXGPGPFEEHPHKFPPXGVKLSGPSPPGNPLPPFFFPVKPKKKPPLLKMGPGFYPRGLKGPPLAPHFGKSPRSPKDEPGPLGGEPPRGTPPPPPREPRARPLPPPGV

SEQ ID NO: 282312 - protein, 363 aa, Glycine max
  Clone ID: PAT_MRT3847_96950C.1.pep
RVAGLIGGWDGAAVGEGDVVAAAVRGGVVLVVVVHRVVVVSPSEETCYPLGASSDENFDYDRPQYTSYAEPSAYGDEALATEYSSYSRPKPRPAPAGFNPAAGSGYGRKQESEYGSGYGRKEEGEYGSGYGGRKEESEYGSGYGRKEEGEYGSGYGGRKEDSEYGSGYGRKQEDEFGSGYGGRKEESEYGSGYGGRKQESEYGSGYGGRKEESEYGSGYGGRKEESEYGSGYDGRKEESEYGSGYGGRKQESEYGSGYGGRKQESEYGSGYGGRSEYEEKPSYGRSNYESQGGGGGVEYGYEGRPPRQEEEEEEGYRKPSYQRKDDDDEEGYGRKKYGDDSDDDDGRKKHHHKHHQYKSYDDE

SEQ ID NO: 282313 - protein, 129 aa, Glycine max
  unsure (1)..(129): unsure at all Xaa locations
  Clone ID: PAT_MRT3847_96951C.1.pep
FSFFHCPILLLLKGGIFKKTXAAKTITLEVESSYTIDILKAKIQDKEWIPPDQQRLILTGXLLEDGRTLADYNIQKEYTLHLVLKLRGHMHIFGKTLTGKTITLEGEYSDTIACVKVWIHDXEGIPPYQ

SEQ ID NO: 282314 - protein, 325 aa, Glycine max
  Clone ID: PAT_MRT3847_96952C.1.pep
GEMAMCTNFLQGQASEWALVRRHSSEDLFGVQICGAYPDTVARTVELIEQECTIDFIDINMGCPIDIVVNKGAGSALLTKPMRMKSIVEVASGTAEKPITIKVRTAYFEGKNRIDSLIADIGSWGASAVTIHGRSRQQRYSKLADWDYVYQCARKAPTTLPVVGNGDVFSFVDWNNHRTECPELATDMVARGALIKPWIFTEIKEQRHWDISSGERLNILKDFVNFGLEHWGSDTKGVETTRRFLLEWLSYTFRYIPVGLLDVVPQRLNWRPPSYYGRDELETLMASDSAADWIRISEMLLGKVPDGFTFAPKHKSNAYDRAENG

SEQ ID NO: 282315 - protein, 55 aa, Glycine max
  Clone ID: PAT_MRT3847_96953C.1.pep
ISLLLIFYHNLLTFINLIPLILPLFFFFFLFFFYPFPSLYPTLSSSHYHSLLSSS

SEQ ID NO: 282316 - protein, 179 aa, Glycine max
  Clone ID: PAT_MRT3847_96954C.1.pep
MSSGGNLSCVLVAVDGSEESMNALRWALNNLKLRSPAPDSTDAPSFTVFHVQSPPSIATGLNPGAIPFGGPSDLEVPAFTAAIEAHQKRITNAVLDHALGICSEFNLTSKVRTHVLVGDPKEKICEAVQDLNADVLVMGSRAFGPIKRMFLGSVSNYCAHHSPCPVIIIKEKDIVNKRN

SEQ ID NO: 282317 - protein, 44 aa, Glycine max
  Clone ID: PAT_MRT3847_96955C.1.pep
SVHFSCLTPKNSLPIARGGFKHATTCRPIHSLHNTWSIITHVHT

SEQ ID NO: 282318 - protein, 95 aa, Glycine max
  Clone ID: PAT_MRT3847_96956C.1.pep
TSLPLHPLCPTSSITTTTTLWVALCPQPPLTTLPCLHNPLTAQHRIAPQQPSLNTSIDSSFTLDNVFFYARSCTTNLASCVFTAFNNVPRRGRVL

SEQ ID NO: 282319 - protein, 58 aa, Glycine max
  Clone ID: PAT_MRT3847_96957C.1.pep
ATHSLGISHQAGQASIELFPFFSRAEVTWNRQHSLHPIRNGGDAGMPFDVRKQHFSSS

SEQ ID NO: 282320 - protein, 86 aa, Glycine max
  unsure (1)..(86): unsure at all Xaa locations
  Clone ID: PAT_MRT3847_96958C.1.pep
MAKXVXSLCFXXLFSGXXFXFSSREQPQQNEXQIQKLNALKPDNRXXXXGVXIGALNPXNKPFXCAVVALSXCTLKXNALRRXXDT

SEQ ID NO: 282321 - protein, 33 aa, Glycine max
  Clone ID: PAT_MRT3847_96959C.1.pep
YMRPALDSCVLLLRNMRFMIHVVAAYAALAHNK

SEQ ID NO: 282322 - protein, 61 aa, Glycine max
  Clone ID: PAT_MRT3847_9695C.1.pep
MKSYFIFRQKNYLLKFYYIRLIALLVNFMCTYNNNILLMGSHTLPLNNFFQFLEKNQHLYW

SEQ ID NO: 282323 - protein, 52 aa, Glycine max
  Clone ID: PAT_MRT3847_96960C.1.pep
VMEGVCKSYVALFCGYYLSCGYNCYGVSRFLVRCRVVSIVFGGYLNLVFLWG

SEQ ID NO: 282324 - protein, 135 aa, Glycine max
  Clone ID: PAT_MRT3847_96961C.1.pep
TPWGWQRVPPHFLFLGLENFTYCGLSFFPLFGFYFPPFFLGLGPFWNLTKLFWPPFFFFFFPSKPGSLERVPFFYYRGGCVFPPPSICTLFFFFPMRTRIFFPSILFFFFFFIPCSPPLPKKKIKHLNLNHKKKN

SEQ ID NO: 282325 - protein, 50 aa, Glycine max
  Clone ID: PAT_MRT3847_96962C.1.pep
QSINMASAKVYVGRSHSSTRTPSLSLSNPLVVVGVPRFACLKRCIFMSYL

SEQ ID NO: 282326 - protein, 34 aa, Glycine max
  Clone ID: PAT_MRT3847_96963C.1.pep
LEKGGSPQNYMVFYPFADKHHVILETTTLYKYKP

SEQ ID NO: 282327 - protein, 241 aa, Glycine max
  Clone ID: PAT_MRT3847_96964C.1.pep
MACAENRQPKVPVFLCFFSFTFVASVLLNCNRVSGQTSAVFACDVAKNPALAGYGFCDKSLSVEDRVADLVKRLTLQEKIGSLVNSATSVSRLGIPKYEWWSEALHGVSNVGPGTHFSSLVPGATSFPMPILTAASFNASLFEAIGRVVSTEARAMYNVGLAGLTYWSPNINIFRDPRWGRGQETPGEDPLLSSKYATGYVKGLQQTDDGDSNKLKVAACCKHYTAYDLDYWKGIQRYTFN

SEQ ID NO: 282328 - protein, 77 aa, Glycine max
  Clone ID: PAT_MRT3847_96965C.1.pep
MSGYPNQPPSYGYGYGAPPPPNPYGALKPRNSYGGPPPVKPYSEGPYAQPSAPYIKPPKNKSHSTRGGSGGGYSEPP

SEQ ID NO: 282329 - protein, 109 aa, Glycine max
  Clone ID: PAT_MRT3847_96966C.1.pep
WNTFVRSIRLCALQLVSLTRVIYCHLVPRSVVVGIFTFLFNHNYHLLKSLCVYIISSILRINTAYLGSFRSRGPIILAIPSCRFIQVILVSPPSPPPKEGGRHTVMTET

SEQ ID NO: 282330 - protein, 65 aa, Glycine max
  Clone ID: PAT_MRT3847_96967C.1.pep
LPMCREEIGIMGGVSQTVGYISVGQDINSIRMKHQRGLKWHRPGISNRNERIFGIIPPFYFHQKL

SEQ ID NO: 282331 - protein, 66 aa, Glycine max
  unsure (1)..(66): unsure at all Xaa locations
  Clone ID: PAT_MRT3847_96968C.1.pep
TQAQVVNSKSPSRFCFSYSLRSRRGSLYLFLNRFPTYFDRGWLQDSGPRVEVIPRRRRVIMMRRXI

SEQ ID NO: 282332 - protein, 47 aa, Glycine max
  Clone ID: PAT_MRT3847_96969C.1.pep
DIRLDNLLSNFRNTPLLKKYQICISFETSHMLVHKINLKYDHLIPTH

SEQ ID NO: 282333 - protein, 169 aa, Glycine max
  unsure (1)..(169): unsure at all Xaa locations
  Clone ID: PAT_MRT3847_9696C.1.pep
LTRGGVPMAMVLNCPRESMYPKISYHDGWMNTFSAIMAGDDMRSGIPYSEILLEADMRINMDPSNCLVIEDSITGCTARKTDXWQSKLYDDLXEQLHLYTAVNEVINTVLDLPLEKWGMPTLADRVVGTLLVDTCDIGVAVVQGLIHSSMVLAIPTSDLSTEGCPDLLS

SEQ ID NO: 282334 - protein, 145 aa, Glycine max
  Clone ID: PAT_MRT3847_96970C.1.pep
SHLFKLILFSGCQMLFFARLFFLLIFFLSTTNGTTETTKNAQSAPEKKRLKILVYSVIPAHSHMQFMGAIADSLAEAGHEVHFIKTMNDELQWMSKAESNETKLSVKVYRVELKSREATVASSDVLYPTSGGNAWTMLNAWDNRF

SEQ ID NO: 282335 - protein, 64 aa, Glycine max
  Clone ID: PAT_MRT3847_96971C.1.pep
LSHSHSYSSVTFSIRSCKYPETCMLRQISAFCSRRAGTSQSNAHALVQKKGSFSQKGTRIGKTP

SEQ ID NO: 282336 - protein, 87 aa, Glycine max
  unsure (1)..(87): unsure at all Xaa locations
  Clone ID: PAT_MRT3847_96972C.1.pep
DSQKLLNSDTATMKKRXSLVGKNRINPYSMEWTGVANRLLSKGNDIVSRDYASFEGXMTTQAMSKMAYKINSLCGGDEKLMREMTHL

SEQ ID NO: 282337 - protein, 38 aa, Glycine max
  Clone ID: PAT_MRT3847_96973C.1.pep
ELDTRLHQLYSDTFVNHCAWHGTTSAGSMVPMTQRSLS

SEQ ID NO: 282338 - protein, 102 aa, Glycine max
  Clone ID: PAT_MRT3847_96974C.1.pep
MDRVRELASKKAAVIFTKSSCYMCHSITQLFYELGASPAVHELDKDAYGREMEWALRSMGCNPSVPAVFIGGKFVGSSKDVISLHVDGSLKQMLMAAKAIWF

SEQ ID NO: 282339 - protein, 102 aa, Glycine max
  Clone ID: PAT_MRT3847_96975C.1.pep
MDRVRELASKKAAVIFTKSSCYMCHSITQLFYELGASPAVHELDKDGYGREMEWALRSMGCNPSVPAVFIGGKFVGSSKDVISLHVDGSLKQMLMAAKAIWF

SEQ ID NO: 282340 - protein, 66 aa, Glycine max
  unsure (1)..(66): unsure at all Xaa locations
  Clone ID: PAT_MRT3847_96976C.1.pep
EMRDLTWCIQYVRPSDFNRRARIRYFVTLMELKCLPQNYVPIHLTSTCYKQVSVTEXLTTATILHX

SEQ ID NO: 282341 - protein, 53 aa, Glycine max
  Clone ID: PAT_MRT3847_96977C.1.pep
AGNRTLGSLGSTPYTMQKKMQKLIASLHIMKQIFTEYYIIKCYMYKCPLSTTH

SEQ ID NO: 282342 - protein, 100 aa, Glycine max
  Clone ID: PAT_MRT3847_96978C.1.pep
NSHRTTISSKAILTADPHNKRIQISKFHLLDFANNKIIECYATDMCLDEGEQSIRASESWKYEDKHRSQIDELLIIPSKLSSLARLSFKFHPLVYKIIIC

SEQ ID NO: 282343 - protein, 36 aa, Glycine max
  unsure (1)..(36): unsure at all Xaa locations
  Clone ID: PAT_MRT3847_96979C.1.pep
NNGXHPKAHQSTCSPAPGMGHLIPMLELGQTPSFTH

SEQ ID NO: 282344 - protein, 64 aa, Glycine max
  Clone ID: PAT_MRT3847_9697C.1.pep
GKTLETKFWRSQTRPWKRGNGQQKKRNPGERVVPPKVNFGKCKKSRETKAEPESEVKEGGKRRQ

SEQ ID NO: 282345 - protein, 137 aa, Glycine max
  unsure (1)..(137): unsure at all Xaa locations
  Clone ID: PAT_MRT3847_96980C.1.pep
MSSHPSFFFLFFFLLLTLPHYSSEYLKLPLLPPTPLPSPSQLLAADLRRLXVKAPLTSGAGTGSXQYFADLRLGSPPQGLLLVGDTGGDLLWGKCAGWXRNWSSSIXGFXPRQWGCFCPHHCYDSAGGPRPHPPRGK

SEQ ID NO: 282346 - protein, 37 aa, Glycine max
  unsure (1)..(37): unsure at all Xaa locations
  Clone ID: PAT_MRT3847_96981C.1.pep
INLNFSPRSNLVQFPSFSYDXTIKAISSTTNCRNMNS

SEQ ID NO: 282347 - protein, 78 aa, Glycine max
  Clone ID: PAT_MRT3847_96982C.1.pep
DFMLGCMENRNFVLMQEWVMSLNRYGLIAIGNEMIVCCEMCEGVRLMVSIVMVGVHHLMVFRLVKMTRPADLNKEHIM

SEQ ID NO: 282348 - protein, 40 aa, Glycine max
  Clone ID: PAT_MRT3847_96983C.1.pep
VTLTQTCLVHRPIQEHIRQVSAYQTRRVRISETLRDACYA

SEQ ID NO: 282349 - protein, 333 aa, Glycine max
  Clone ID: PAT_MRT3847_96984C.1.pep
MPTDTSSVSGGEIVCVTGAGGFIASWLVKHLLEKGYTVRGTVRNPDDPKNGHLKELEGGKERLTLHKVDLFDIDSIKEALNGCHGVFHTASPVTDNPEEMVEPAVNGTKNVITAAAEAKVRRVVFTSSIGTVYMDPNTSRDALVDESFWSDLEYCKNTKNWYCYGKTVAEQTAWDVAKERGVDLVVVNPVLVIGPLLQPTINASTIHILKYLTGSAKTYVNATQAYVHVRDVALAHILVYEKPSASGRYICAESSLHRGELVEILAKFFPEYPIPTKCSDEKNPRVKPYIFSNQKLKDLGLEFTPVKQCLYDTVKNLQENGHLPVPPKQKDSY

SEQ ID NO: 282350 - protein, 64 aa, Glycine max
  Clone ID: PAT_MRT3847_96985C.1.pep
SSRRERIHKLFQSGVESGATLLLDGTNMVLPGYESGNIIVPTILSNFNANMHCYIEYTSGPLLL

SEQ ID NO: 282351 - protein, 38 aa, Glycine max
  Clone ID: PAT_MRT3847_96986C.1.pep
MGKDTIADILSYVGNADMNKTGVGHKPFTNVTEDIGKV

SEQ ID NO: 282352 - protein, 38 aa, Glycine max
  Clone ID: PAT_MRT3847_96987C.1.pep
ALCTEARPPVTHASASAVAAVALSRVSLSFASAAAFSA

SEQ ID NO: 282353 - protein, 58 aa, Glycine max
  Clone ID: PAT_MRT3847_96988C.1.pep
WAHFKNLKPSHDGSLFSVMKRTIGPQWHLYLKTCRHMPNVCEAQLGNKSSWVNTKERR

SEQ ID NO: 282354 - protein, 50 aa, Glycine max
  Clone ID: PAT_MRT3847_96989C.1.pep
CVPLEEAFHIFKCNVYKSSTIVQIILVKDIIKVTKSSMGRLMIDHSQEVF

SEQ ID NO: 282355 - protein, 50 aa, Glycine max
  Clone ID: PAT_MRT3847_9698C.1.pep
SFRPPPCPSMATTSPGSRVILSKASKLIRTVSRVRRIFDQRSEMWPHPTS

SEQ ID NO: 282356 - protein, 202 aa, Glycine max
  unsure (1)..(202): unsure at all Xaa locations
  Clone ID: PAT_MRT3847_96990C.1.pep
EQXXFGXXQVREXARALQXXXXXFLWSLRXXPXXDSSFMAMPSDYLPSDFVEILPPGFLDRTAGIGKVIGWAPQAQILAHPATGGFVSHCGWNSTLESIYFGVPIATWPLYAEQQTNAFLLVRELNMAVEIALDYRVQFMAGPNTLLSADKIQNGIRNLMDMDLDTKKRVKEMSEKSRTTSLXGGCSHSYLGRLIDYIMNQV

SEQ ID NO: 282357 - protein, 87 aa, Glycine max
  Clone ID: PAT_MRT3847_96991C.1.pep
GYEPTLCAGHRLREPATLPLLVYLLNTLLFDVGLRVRFKLACGLAQFSAQFQVQAGEILDECSHSAIWSRTSWADCAMPLLCFTLLF

SEQ ID NO: 282358 - protein, 44 aa, Glycine max
  Clone ID: PAT_MRT3847_96992C.1.pep
MPSGHLEHVMPLEEGGAALYRLAGMDPLYHTLRDITHAAGKLSL

SEQ ID NO: 282359 - protein, 166 aa, Glycine max
  Clone ID: PAT_MRT3847_96993C.1.pep
MGGGKDKHNEEEKGVFSHLAHGVAQAAHGYPPGAYPPHQGYPPGHGYPPQGGYPPAGYPPAGYPPAAGGYPPAGYHPHGYPGSSAPHGSHAHGHGGMGALLAGGAAAAAAAFGAHHVSHGHHGYGGYGHMPHGKFKHHGKFKHGKFGKHGKFKHGKFGKGMFKKWK

SEQ ID NO: 282360 - protein, 93 aa, Glycine max
  Clone ID: PAT_MRT3847_96994C.1.pep
NFVALNKNVIRGAFHHIPLMAPITLSTFRPGYQEPSFGNNRFEMMAETSNFGRKTSSLQKKTLELRKENNIYCDLHPLKNHAVRINFFFGQPL

SEQ ID NO: 282361 - protein, 134 aa, Glycine max
  Clone ID: PAT_MRT3847_96995C.1.pep
MTGTGSPCGACKFLRRKCVRGCVFAPYFCQEQGATHFAAIHKVFGASNVSKLLAHLPVSDRCEAAVTISYEAQARLQDPIYGCVSHIFALQQQVVNLQAQLAYLKEQAAQSCLNGTINENPNEKLLEKSSAALP

SEQ ID NO: 282362 - protein, 40 aa, Glycine max
  Clone ID: PAT_MRT3847_96996C.1.pep
CSGRCLNCFQCSKFKCNSLKSSLRVGSIQKLFPLICRLAK

SEQ ID NO: 282363 - protein, 79 aa, Glycine max
  Clone ID: PAT_MRT3847_96997C.1.pep
TPLFLLGQLMSACSGTSPVCVLAGPLFGCYKADSFISVLFVNLTPMVLSTLGFLWRGWLYNPTIKLKKPKKKKKKGGHH

SEQ ID NO: 282364 - protein, 64 aa, Glycine max
  Clone ID: PAT_MRT3847_96998C.1.pep
REGWAVHIWYERPKNRWDPYLYMCHIWQTKGRFYDLPRDKLALKGFWGQKDFKIQYPQTNTQIF

SEQ ID NO: 282365 - protein, 42 aa, Glycine max
  Clone ID: PAT_MRT3847_96999C.1.pep
PINKPIDILSMAENHTGSPAPTTLVYLLGSHERKLHCLLTPT

SEQ ID NO: 282366 - protein, 57 aa, Glycine max
  unsure (1)..(57): unsure at all Xaa locations
  Clone ID: PAT_MRT3847_9699C.1.pep
ASMMVHCKLGRLNKFQILLTLETCIVRDNQNKGVNAFLFFSFTLSWMRARXTFKLFF

SEQ ID NO: 282367 - protein, 101 aa, Glycine max
  Clone ID: PAT_MRT3847_969C.1.pep
FFFFFFFFFFFFFFFFFFFFFFWPKTSLPNYYKNIKPRNIINPKKKSLPPKFYKKGTKGGAKKGAPRSYGLKGYKGPKGIFNRKYPLYKNWQAPKAPTNAG

SEQ ID NO: 282368 - protein, 65 aa, Glycine max
  Clone ID: PAT_MRT3847_96C.1.pep
YQPPAMCMPLFLPPCIQCDGRHCHDQLTYKQSSGCSLKPHISTAAVAPGRASALSTRVSSHTHRR

SEQ ID NO: 282369 - protein, 168 aa, Glycine max
  unsure (1)..(168): unsure at all Xaa locations
  Clone ID: PAT_MRT3847_97000C.1.pep
KYFVVRNCLPNVKSDMLLSAWNPPSEWGKXEIYPLKIHLTETMYRMMWEYFFPEEEQDSQRRQEVWKVSTTAGARRVKKGSSVLEASASNSHTTKESEASSKSGISAMLFPTSSQPPAHVDSAQASKTQNVKANPGNGATPELRRTSSFDRTXEETVAESVANELVLQ

SEQ ID NO: 282370 - protein, 607 aa, Glycine max
  Clone ID: PAT_MRT3847_97001C.1.pep
TQRLLHDDIRKLSLWCNPSVDPHQEKESELWMISGGRSLLVQGLKRELVIAQKSRKAASVSLRMALQKAAQLRLTEKEKNKSPSYAMRISLQINRVAWSMLVDGKSFAEAEISDMIYDFDRDYKDVGIARLTTKYFVVRNCLPNVKSDMLLSAWNPPSEWGKKVMLRVDARQGAPKDGNSPLELFEVEIYPLKIHLTEMMYRMMWEYFFPEEEQDSQRRQEVWKVSTTAGARRVKKGSSVLEASASNSHSTKESEASSKSGISAILFPTSSQPPSHVDLAQASKTQNVKANPGNGATLELRRTSSFDRTWEETVAESVANELVLQSFSSSKNGQFGSTEQQDEAAKNKSKDSKGVKGGRSSHEEKKVAKSHEEKRSRPRKMMEFHNIKISQVELLVTYEGQRFVVNDLKLLMDQFHRTEFTGTWRRLFSRVKKHIIWGVLKSVTGMQGRKFKDKGQSQPPGAGVPEIDLILSDNEGQAGKSDQYPPSWPKRPSDGAGDGFVTSIRGLFSTQRRKAKAFVLRTMRGEAENDFQGDWSESDMDFSPFARQLTITRAKKLIRRHTKKFRSRGQKGSTSQQRESLPSSPREPTPFDSDSSSGSSPYEDFHE

SEQ ID NO: 282371 - protein, 44 aa, Glycine max
  Clone ID: PAT_MRT3847_97002C.1.pep
LKYLVEEGRGELILTTHRVLFIEIHKKLQLYIALISHLTLTLLP

SEQ ID NO: 282372 - protein, 84 aa, Glycine max
  Clone ID: PAT_MRT3847_97003C.1.pep
MSTMPRRSSCGRSAHTAHRAAPTNAPIHHAPSTATAHIGGGSMLVGIGSTIAQGMACGTIRAVALLSAHADMAPLISSRASVTT

SEQ ID NO: 282373 - protein, 121 aa, Glycine max
  Clone ID: PAT_MRT3847_97004C.1.pep
EENFPPFEGPPAFVCLFFKHVPLDFKNIQQLVFFWVWGQMGSPRFFFRLRANPAPKMPNFEKINPGAHFFFWPKKDNMAAGFLIGGGGFLGGPGLFLWFPFNIDSSGAPGAPEKEKHLFGD

SEQ ID NO: 282374 - protein, 132 aa, Glycine max
  unsure (1)..(132): unsure at all Xaa locations
  Clone ID: PAT_MRT3847_97005C.1.pep
GLRPTRASRKSDRLMASLELGSVAIGTCAMELVNEEIHARLSPIMVSTARGELNCGCVQALHDVLRRFSFCSICXIXFGLGQRCLLPDLPIADLDVAFDTGLXLCDVRAMNASSLIRKLKRLLNIGSERKLR

SEQ ID NO: 282375 - protein, 61 aa, Glycine max
  Clone ID: PAT_MRT3847_97006C.1.pep
DNSVPTNQQPQPALFGVGQGVSELEADKNQRYQSTLQFAANLLQQIQQQQTQGGHRTRGQQ

SEQ ID NO: 282376 - protein, 54 aa, Glycine max
  Clone ID: PAT_MRT3847_97007C.1.pep
AFTSNLLQIFQNCSHLVSWGLHDWMLVVLLVDTYSCTRLCSDSEEHDLCYYFNE

SEQ ID NO: 282377 - protein, 192 aa, Glycine max
  Clone ID: PAT_MRT3847_97008C.1.pep
MTEYKLVIVGGGGVGKSALTIQLIQNHFIDEYDPTIEDSYRKQVTIDNETCLLDILDTAGQEEYSFMRDQYMRTGQGFICVYAITSRSSFDEISSFREQILRVKDEDKVPMVVAANKCDLESERQVTTAEGQDLAKSFGCPFYETSAKARINVEDSFYQLVREIRKYNQAKNGGVADKKGKKGGKKAGCSLL

SEQ ID NO: 282378 - protein, 174 aa, Glycine max
  Clone ID: PAT_MRT3847_97009C.1.pep
NKSFVPSEGRRFGSNGGGFERERRVVGFGSSGGADSDNWNTKKGESNVGSESVGGRPKLVLQPRTVSVSDEGVDGNNAGKPKGVNPFGEARPREQVLAEKGQDWKKIDEQLESVKIKEASGGDGYAKRGFGSSNGGGGRATLPESRTERSWRKPQFDDDRPKRFVIDTNTNPTR

SEQ ID NO: 282379 - protein, 29 aa, Glycine max
  Clone ID: PAT_MRT3847_9700C.1.pep
HVARLKPFDVEYIDLYYQHRVDHALPIEE

SEQ ID NO: 282380 - protein, 100 aa, Glycine max
  Clone ID: PAT_MRT3847_97010C.1.pep
RLWQMEITTDPPQLLSIPMALCRQRWPACRNCNTTPTFITPRLCPPVPRVRASICIGALTQLAQRTFRTSVKRPNLWTNMKHRPKAWGPQMAGRTTRCLA

SEQ ID NO: 282381 - protein, 134 aa, Glycine max
  Clone ID: PAT_MRT3847_97011C.1.pep
MAATVSSAWSKPGAWALDSEEHEAELLQQNNNNPNDKPLADFPSLAAAAATKPKKIDEQLESVKIKEASGGDGFGKRGFGSSNGGGGRATLPESRTERSWRKPQFDDDRPKSAEKVEDEPDQKKEVEDEHVEKN

SEQ ID NO: 282382 - protein, 380 aa, Glycine max
  Clone ID: PAT_MRT3847_97012C.1.pep
MAATVSSAWSKPGAWALDSEEHEAELLQQNNNNPNDKPLADFPSLAAAAATKPKKKKAQTYSLAEFTAKPDSAFADQDPVVLPTGPRQRTAEELDRTRLGGGFRNYGDRPNRNNSSGGDESSNSRWGSSRVSDEPRRNGFGARDSNRELPPSRADETDNWAAAKKPSGGFERRERDKGGFFDSQSRADESDSWVSNKSFVPSEGRRFGSNGGGFERERRVVGFGSSGGADSDNWNTKKGESNVGSESVGGRPKLVLQPRTVSVSDEGVDGNNAGKPKGVNPFGEARPREQVLAEKGQDWKKIDEQLESVKIKEASGGDGFGKRGFGSSNGGGGRATLPESRTERSWRKPQFDDDRPKSAEKVEDEPDQKKEVEDEHVEKN

SEQ ID NO: 282383 - protein, 36 aa, Glycine max
  Clone ID: PAT_MRT3847_97013C.1.pep
ILFSSKLKKYQFQLNLIIFNLQYKYNFFYLDSSLYP

SEQ ID NO: 282384 - protein, 48 aa, Glycine max
  Clone ID: PAT_MRT3847_97014C.1.pep
TLYFSPYHFLYYFIIYKSPGLAQKYIIRKEETVRSTRSSLIDSWPKHN

SEQ ID NO: 282385 - protein, 85 aa, Glycine max
  unsure (1)..(85): unsure at all Xaa locations
  Clone ID: PAT_MRT3847_97015C.1.pep
VVRISEHKGRVVPVWFIILQKAFTCSWSGHARFSVALSTLFSTNCSFYTKILSIYLSSXPFFFPFSFFQPSIGYFSLFLYFFMPS

SEQ ID NO: 282386 - protein, 51 aa, Glycine max
  Clone ID: PAT_MRT3847_97016C.1.pep
LGKRRKRDLYPPPMHVLCWPERVFSPSKVYKKLEQPFTECVKSFFLGEWGF

SEQ ID NO: 282387 - protein, 40 aa, Glycine max
  Clone ID: PAT_MRT3847_97017C.1.pep
LINSIFFNSYFTCWSIYNHTKKNIDKPHQTNNFGTNSCTT

SEQ ID NO: 282388 - protein, 41 aa, Glycine max
  Clone ID: PAT_MRT3847_97018C.1.pep
TTWHKSNAFKLKSHRDWYTFEHDTQFYIHPKNLNRGEILEV

SEQ ID NO: 282389 - protein, 107 aa, Glycine max
  unsure (1)..(107): unsure at all Xaa locations
  Clone ID: PAT_MRT3847_97019C.1.pep
MSDLQDPLGVFQGSEGTYAFRLIKHFTLMLGQEPTQTTSNLXTYFSFRHPILKPGLNPXYTPIGLIYKMKYLEENMLLNLHLNKCTDGSTLLHFCTHSQTYEHSVQE

SEQ ID NO: 282390 - protein, 87 aa, Glycine max
  unsure (1)..(87): unsure at all Xaa locations
  Clone ID: PAT_MRT3847_9701C.1.pep
TPNDPSCLREAPILRNLEAARDQNSVPVRVAYQLVVTGHRHXDVRTPQEINAGHAHGAINIPYMYTDASRMTNNINYIRKTPPYFRR

SEQ ID NO: 282391 - protein, 94 aa, Glycine max
  Clone ID: PAT_MRT3847_97020C.1.pep
MFASLIVSADNRITGTTICNCRDLHILGVYYTIAPQFRKFLPHYIRWDLYTPLIYILPSFVTAGIKYKRHQSNIQICGLFYDGRYIFLTKHDKN

SEQ ID NO: 282392 - protein, 77 aa, Glycine max
  Clone ID: PAT_MRT3847_97021C.1.pep
KFKACGTSTPGMRYHRHSTRFTERSLHDTAWTISDALITASDVKTTHATFKLAMTQKNKFRDKSDTTMYVFVFWNVV

SEQ ID NO: 282393 - protein, 59 aa, Glycine max
  Clone ID: PAT_MRT3847_97022C.1.pep
DRKCVVHSTLTYSTYLHLLHRSAYRNWDFNQLRTNSETESANHLVGGLNEICNLLNCKL

SEQ ID NO: 282394 - protein, 63 aa, Glycine max
  Clone ID: PAT_MRT3847_97023C.1.pep
KLGEIRAKVVPWGKWYSVKNSKKNTTGKKKGKSRGAQRGDLTKLIGVGLTARFQGGKLVGPVD

SEQ ID NO: 282395 - protein, 69 aa, Glycine max
  Clone ID: PAT_MRT3847_97024C.1.pep
KELTVSDRLFDHTLICPYSRHLNHALLLQNQRSHLFKIPVYGFSVSLIDETNIFEWSVTINGPSDTLYE

SEQ ID NO: 282396 - protein, 188 aa, Glycine max
  Clone ID: PAT_MRT3847_97025C.1.pep
TYQASSSVLSLKPMANFDDPSGQASSSNCSACHNQESISQSHITEIVESSRRKARMMVVQATQAMSNLRKTESKVERIEDAINFINNQLSVDEPTASATTFLPTDSFSLASQDQLTASVLNPLASCHVQDAELNSSSDQNEMKIPSELISHCLATLFVIQKCTERQFPPADVAQVLNSAVTSLQPLTL

SEQ ID NO: 282397 - protein, 46 aa, Glycine max
  unsure (1)..(46): unsure at all Xaa locations
  Clone ID: PAT_MRT3847_97026C.1.pep
AKKITLKSSDGEAFQVDQAAALESHTIKHLIXDDCADSGIPLPNAT

SEQ ID NO: 282398 - protein, 49 aa, Glycine max
  Clone ID: PAT_MRT3847_97027C.1.pep
RRSLFKGAKGYRIEPKLLPTSNRENLCSRESYLASAPFHREEISNSFEP

SEQ ID NO: 282399 - protein, 366 aa, Glycine max
  Clone ID: PAT_MRT3847_97028C.1.pep
MGEIEREEMSSTRWEKEEEEEEEEAQMDIWKYIFGFVELAVIKCAIELGIAEAIEKHGSPMTLSEISSSLGCDTSHLKRIMRFLVQRKIFKGDGCSRGYSQSALSRRLMRNGEHSMASFLLLESSPVMLAPWHSLSARVMANGNPSFAKAHGEDVWRYAAANLDHSNLINEAMACDAKLVMPIIIQSCSEAFHGLKSLVDVGGGNGTAMRILAKACPSIRPINFDLPHVIALCDGDGDGVQHVSGDMFLSVPKADAAFLMWVLHDWSDEECIQILKKCREAISNSKENGRVIIVEAVIEGEGEGEGGKHDGLKDVGLMLDMVMMAHTNFGKERTLKEWEYVIKMAGFSSYTVKPIHAVQSVIMAFY

SEQ ID NO: 282400 - protein, 179 aa, Glycine max
  Clone ID: PAT_MRT3847_97029C.1.pep
MVQENGKRKKPNILVTGTPGTGKTTVCTALAEATQLCHINVGELVKEKNLHDGWDDELDCYLLNEDLVCDELEDVMEEGGNIVDYHGCDFFPERWFDCVVVLQTDNTILYDRLSRRGYKDSKLSNNIECEIFQVLLEEAKESYSEEKVIAMKSDNIEDVSRNVATLTDWVRNWSLPSHS

SEQ ID NO: 282401 - protein, 86 aa, Glycine max
  unsure (1)..(86): unsure at all Xaa locations
  Clone ID: PAT_MRT3847_9702C.1.pep
ELMTDIDRRSCKYLYEDPKFVKNGDSSFXKMIPTKPMVVETFSEYPPLGRFSVMDMRQTVAVGVINNFEKNDPTVANVTNAAHKNN

SEQ ID NO: 282402 - protein, 48 aa, Glycine max
  unsure (1)..(48): unsure at all Xaa locations
  Clone ID: PAT_MRT3847_97030C.1.pep
PVFGDIMTPNKFDNAYFQTLGKGXXHXWVWNDTGQDRSTCKAKKIGPS

SEQ ID NO: 282403 - protein, 50 aa, Glycine max
  Clone ID: PAT_MRT3847_97031C.1.pep
KMRRYKHGKRHNLPLRRKHGSILSLANANRVSTLHRERIRRTLSYTKYLT

SEQ ID NO: 282404 - protein, 76 aa, Glycine max
  Clone ID: PAT_MRT3847_97032C.1.pep
MAKQLIPFIISLLLFIFTEVEGAKRSYGVYNSNPVKLFVFGDSYVDTGNFVHSESYKPPSGITFPGNPAGRFCDGR

SEQ ID NO: 282405 - protein, 67 aa, Glycine max
  Clone ID: PAT_MRT3847_97033C.1.pep
YFLVSGIQVVNLVDHFKGAGFSPSRSVEEFCVKPKEWFLDQALEHVSFDARLNEGKGEEKRGLPKSE

SEQ ID NO: 282406 - protein, 83 aa, Glycine max
  unsure (1)..(83): unsure at all Xaa locations
  Clone ID: PAT_MRT3847_97034C.1.pep
AISLCNVIFKVITEAFANRMKTVVPSLIGESQSTSVSDKLIXDNTIIAFECFHHMKQKKKGRKGIVALKFDILXYYDRVEWDF

SEQ ID NO: 282407 - protein, 80 aa, Glycine max
  Clone ID: PAT_MRT3847_97035C.1.pep
KEPEGAPKKPKTFKPTGNFSLDDVIEIPRVLSPRSMAKALRGSLKEILGTGVSVGCPVNGKVPKDFHQEIPHGNVKAPLD

SEQ ID NO: 282408 - protein, 134 aa, Glycine max
  unsure (1)..(134): unsure at all Xaa locations
  Clone ID: PAT_MRT3847_97036C.1.pep
LSRGLLSNTIFCMDLIHSTGKADEFKDLVTNITKLVGTPNLADFITALKMVDPQSIKRRQSMNSKKVXDMLNHLGSQRLKQMEEGKVHNDVLXDAMLNIANDDKCMDYNXVIHLSHDVFVVGTDTTSITFEWAM

SEQ ID NO: 282409 - protein, 657 aa, Glycine max
  unsure (1)..(657): unsure at all Xaa locations
  Clone ID: PAT_MRT3847_97037C.1.pep
CPENKENCSPKRRRKCNMRAGKDSSKRGIHARDTTXARQTDRGDKSTKVSLSPSPGFQMMQSNEVQQFGHIDSNSTKSFAVVNTSTSSLPDLNTSASPPVLFHQPFTDQQQVQLRAQIFVYGALIQGMVPDEAYMISAFGGSDGGRSLWDNAWRACMERQHGQKSHPANPETPLQSRSVARTSDLPHKQSAAQAIGKSLSIIPLSSPLWSLSTLGLGSDSLQSSAIARGSVVDYPQAITPLHPYQTTPVRNFLGHNTPWMSQTPLRGPWIASPTPVTDNSPQISASPASDTIKLGSVKGSLPPSSGIKNVTSGLSTSSTGLQSIFTGTASLLDANNVTVSPAQHSSDPKPKKRKKVVVSEDLGQRAFQSLAPAVGSHTSTPVAVVVPVGNVPITTIEKSVVSVSPLADQSKNDQNVEKRIMSDESLMKVKEARVHAEEASALSAAAVNHSLELWNQLDKHKNSGLMPDIEAKLASAAANVASNAALQAKLMADEALLSSGYDNSSQSNQISLSEGTNNLGKATPASILKGANGTNSPGSIIVAAKEAVKRRVEAASAATKRAENMDAIVKAAELAAEAVSQAGKIVTMGDPLPISQLVEAGPEGCLKATRESSQQVGLFKDITRDMVNINVRDIPETSYTHNRDILSGGISASIKIQ

SEQ ID NO: 282410 - protein, 49 aa, Glycine max
  Clone ID: PAT_MRT3847_97038C.1.pep
SVRSQLGQFHDEAKLPGHGVKSCQLPTVLRQRTQLHSASVESWTGHQHI

SEQ ID NO: 282411 - protein, 536 aa, Glycine max
  unsure (1)..(536): unsure at all Xaa locations
  Clone ID: PAT_MRT3847_97039C.1.pep
ENAWRTCMKRQHGQKSHPANPETPLQSRSVARTSDLPHKQSAAQGKGISSPLGRTSSKATPPIVNPLIPLSSPLWSLSTLGLGSDSLQSSAIARGSVVDYPQAITPLHPYQTTPVRNFLGHNTPWMSQTPLRGPWIASPTPVTDNSPQISASPASDTIKLGSVKGSLPPSSGIKNVTSGVSTSSTGLQSIFTGTASLLDANNVTVSPAQHNSDPKPRKRKKVVVSEDLGQRAFQSLARGLVLVAXTSTPVAVVAPVGNVPITTIEKSVLSVSPLADQSKNDRNVEKRIMSDESLMKVKEARVHAEEASALSAAAVNHSLELWNQLDKHKNSGLMPDIEAKLASAAVAVAAAAAIAKAAAAAANVASNAALQAKLMADEALLSSGYNNSSQSNQICLSEGTNNLGKATPASILKGANGTNSPGSIIVAAKEAVKRRVEAASAATKRAENMDAIVRAAELAAEAVSQAGKIVTMGDPLPISQLVEAGPEGCLKATRESSQQVGLFKDINRDMGNNNVRDIPETSYTHNRDILSGGISA

SEQ ID NO: 282412 - protein, 70 aa, Glycine max
  unsure (1)..(70): unsure at all Xaa locations
  Clone ID: PAT_MRT3847_9703C.1.pep
FIQSTALTSPHQRVDATLIPRCSSLSVLRKLPLLIGGLIKGLVTCLRTLRPXXRXXSPRMLCGRQGRGAK

SEQ ID NO: 282413 - protein, 128 aa, Glycine max
  Clone ID: PAT_MRT3847_97040C.1.pep
PQLRVAWAHVFGWGCGKEGVCVLVKTLFSGKLSNYDAMQAELCFQFPSMQGPPNWDLLTQPASHFLLNLLEGGPNLVRFRKKKGLLTPPPGPGKIPPQKGGREHWSLAPKKNQEKKAWVQCFFFAPGG

SEQ ID NO: 282414 - protein, 63 aa, Glycine max
  Clone ID: PAT_MRT3847_97041C.1.pep
TKLNLSLISFLFFVNYRCIRLMEMASETINRVDSVDDIKFMEDEEEARVEPKPNAKENRSDND

SEQ ID NO: 282415 - protein, 52 aa, Glycine max
  unsure (1)..(52): unsure at all Xaa locations
  Clone ID: PAT_MRT3847_97042C.1.pep
XTVSKHDVIVVXFYAPWCXXWXXXAXXXXKAAXIXXSHDPPXVLAKVDANXE

SEQ ID NO: 282416 - protein, 36 aa, Glycine max
  unsure (1)..(36): unsure at all Xaa locations
  Clone ID: PAT_MRT3847_97043C.1.pep
LILNCLLVNIWCYAKDLCCNSIPAFQQCFLSVFXTM

SEQ ID NO: 282417 - protein, 63 aa, Glycine max
  Clone ID: PAT_MRT3847_97044C.1.pep
RINQDVNHSGRLKDRETYVKLLIPPSTELSVRLPHRQRSRQTTALPQLIPTKRPPYIYIPRTS

SEQ ID NO: 282418 - protein, 181 aa, Glycine max
  Clone ID: PAT_MRT3847_97045C.1.pep
MQIFVRTDRTHLIEVSPAQTVADVKAAVEALQGLEAGEQRILFNGVQLEDGQVLAEAGVSDDSTLMCLLRLLGGAKKRKKKTYTKPKKQKHKHKKIKLRVLKFYKVDDSGKVQRLRKQSPNCGPGTFMATHFDRVYCGKCSNTFVYEGGAPAGAPKKAAAAPAAAAAAAPEAPAKGKKGKK

SEQ ID NO: 282419 - protein, 90 aa, Glycine max
  unsure (1)..(90): unsure at all Xaa locations
  Clone ID: PAT_MRT3847_97046C.1.pep
ERVMEKIKKKVKGEINISKWAILGPLTIALGGISNRIPVLKRVGSXEIIDPFDFPAATAWKTSLPSNPLIKDSLPPKNKXFVYLKDLKSI

SEQ ID NO: 282420 - protein, 85 aa, Glycine max
  Clone ID: PAT_MRT3847_97047C.1.pep
MPNPKVFFEMMIGGQSAGRIVKELYGYVTPRTAENFRTLCTGKIGVRRSSNPLDYNGSCIDRVIPSFMCQVGDFNVSNGIGGESN

SEQ ID NO: 282421 - protein, 105 aa, Glycine max
  unsure (1)..(105): unsure at all Xaa locations
  Clone ID: PAT_MRT3847_97048C.1.pep
PPLFGGKKKLCFPPPFFISGEGGGYMVRGYNPGSGGTXLXPLFNFLIPFSPNIPGWKINYISLPKKGGGGSFCIFGPKEISPTHPSFLVTXKKKKKKKKKKKKKK

SEQ ID NO: 282422 - protein, 46 aa, Glycine max
  Clone ID: PAT_MRT3847_97049C.1.pep
TPTTVQTSNFISNFTITTQTYYSIKPNSKIYILNHTKKFLFLINLT

SEQ ID NO: 282423 - protein, 127 aa, Glycine max
  Clone ID: PAT_MRT3847_9704C.1.pep
MSLSGIENKCNEVHGDDELSDDGVFQSGEKKKRLNLEQVKALEKSFDQGNKLEPERKVQLAKALGLQPRQVAIWFQNRRARWKTKQLEKEYEVLKKQFEAVKADNDVLKVRNQKLQAELQAVKSKDW

SEQ ID NO: 282424 - protein, 54 aa, Glycine max
  Clone ID: PAT_MRT3847_97050C.1.pep
TEKKFSIYKVRLYIKQSYITMLSISIQKDSLLPVKTSNRKSPTSNWTFVMNAII

SEQ ID NO: 282425 - protein, 78 aa, Glycine max
  unsure (1)..(78): unsure at all Xaa locations
  Clone ID: PAT_MRT3847_97051C.1.pep
XSPXXSAXFTRQRXSXQGRGXYDXEXHCEFASXXFCPCCXDRFCXCXXTSXESXDRVRXKFHLXIGTFSTXTKMQLXL

SEQ ID NO: 282426 - protein, 47 aa, Glycine max
  Clone ID: PAT_MRT3847_97052C.1.pep
SHDSSGRLLTLVLDLHLSNYMAPSGPVTIGTRDLMQPFTLNTIWYNI

SEQ ID NO: 282427 - protein, 50 aa, Glycine max
  Clone ID: PAT_MRT3847_97053C.1.pep
VQKKILTYEKNVRTYYYCLIHYDQERLLLLSVLVRFNWYKTVVKGLSFIF

SEQ ID NO: 282428 - protein, 121 aa, Glycine max
  unsure (1)..(121): unsure at all Xaa locations
  Clone ID: PAT_MRT3847_97054C.1.pep
ENYKASNTINAYNYIGVLKLGRSIPEAIIRQAKGQAIITXVAKVRVGGTNKSETGLVVARREDSSRSPTSANSTYGVRWGAQAGGELTNFINGLKTKDALKTFGGNNHFSIGARLNAAVSF

SEQ ID NO: 282429 - protein, 60 aa, Glycine max
  Clone ID: PAT_MRT3847_97055C.1.pep
HAKKLASLADLSVNDAFGTAHRAHASTQGVTKYLNPSVAGCLLQNERHCLVEAVSNAQKA

SEQ ID NO: 282430 - protein, 70 aa, Glycine max
  Clone ID: PAT_MRT3847_97056C.1.pep
YQLYLFHFLSHFHSVYRKWYLEPFFRALVLLRSFLQCVHGFRSFQFCFSHFPIRLQRNSMTPIICTGINT

SEQ ID NO: 282431 - protein, 63 aa, Glycine max
  Clone ID: PAT_MRT3847_97057C.1.pep
KKKSSKKVWGVITRQRTYTTKIGFSHGPRRGDLNPFFAKKRKGPLPFYFKRGIVFPARVWDHK

SEQ ID NO: 282432 - protein, 84 aa, Glycine max
  Clone ID: PAT_MRT3847_97058C.1.pep
GGKYRAPILDFKQWRDLIKHSETGLGKNNWLHKCLKKLGFPLWVSLKLKVISQKGFPHQRLGKPLLFYNTRPTHPQKLKTKGNF

SEQ ID NO: 282433 - protein, 88 aa, Glycine max
  Clone ID: PAT_MRT3847_97059C.1.pep
TTYLKLNHSLLLYTIDLPLKWTGNARSRYRHILPQPPRRRSHQPDSIETMAGEISEDACTTHIMQTNEHATCPLRQMGGCIYVLHEDQ

SEQ ID NO: 282434 - protein, 101 aa, Glycine max
  Clone ID: PAT_MRT3847_9705C.1.pep
GVDIMGVMPGGGLFLKTNVKLHKATFNYLDRWVPILFPSTKKENHGGLLGLFKKKPTSPRDWRRSKERRWSLRHASLIWRECFKLGVAVLIAKCKKKKLGG

SEQ ID NO: 282435 - protein, 44 aa, Glycine max
  Clone ID: PAT_MRT3847_97060C.1.pep
MTHFLINPIIMILGKFIIIDMLLLTCYSVPITISPIRHIGLLNL

SEQ ID NO: 282436 - protein, 163 aa, Glycine max
  Clone ID: PAT_MRT3847_97061C.1.pep
LGLALLNQARNMISSGDNPMKALELSLQAMKLFERAAAYGKPSLDLAMCLHVTAAIYCSLGHFSEAIPIIERSIEIPTIEEDHQHAIAKFAGHMHLGDIYAMLGHLEKSIKCYTEGLKVQRKALGETDPKVGETCRYVAEANFQALQFDEAERLCQIALDIHR

SEQ ID NO: 282437 - protein, 71 aa, Glycine max
  Clone ID: PAT_MRT3847_97062C.1.pep
PRVRIRAAAFFFFFFFFFFSLNTFLSSFFGGWESKILGQSWLTVHLYLYHSLESLQLSILFHFRFRDLTDN

SEQ ID NO: 282438 - protein, 65 aa, Glycine max
  Clone ID: PAT_MRT3847_97063C.1.pep
FIHITNKPFPTLLFAFINTSKICVLCHILNIIKTNIATYTLVIPLLVLSITGIGTYIVFTFALNT

SEQ ID NO: 282439 - protein, 54 aa, Glycine max
  unsure (1)..(54): unsure at all Xaa locations
  Clone ID: PAT_MRT3847_97064C.1.pep
WNTIPEPKLCFQMTLCVNKYFTLSIFATGLALLKDGVILASCPXSRVIHVEILY

SEQ ID NO: 282440 - protein, 125 aa, Glycine max
  unsure (1)..(125): unsure at all Xaa locations
  Clone ID: PAT_MRT3847_97065C.1.pep
HRIGVDLDKGGDTPNEIDCSQVEKLHLRKIFDXPKTRWLTILPMECNLVVRQKLMNSXRSLLKKRDQLSWQVGINPYSMEWTVLANALQGEGKWILCWDYXRCYGVDTKQVFSNMGKMINSSVGW

SEQ ID NO: 282441 - protein, 117 aa, Glycine max
  Clone ID: PAT_MRT3847_97066C.1.pep
NQSNYGKRNQFRPMGTEDSPHGLSLGIYPRTLSAGPSESGFSVVPQTLGRDPEELCVTTFADFCRSVGLAPGSLPRSPLCSGPLNVEMWMHTEIKAIRCVAKKKKKKGRAARDLELV

SEQ ID NO: 282442 - protein, 112 aa, Glycine max
  Clone ID: PAT_MRT3847_97067C.1.pep
TPNRWSTAYRDKTSGPRWLLEKQVNIMEVHLFMKTSTLARKRKGLLRAYKLQIGSPSHRCETRDNKESLRPIQKSFVVWFVTLLSNLKTPQLVSQCINFLGPHSLRSYHKRR

SEQ ID NO: 282443 - protein, 132 aa, Glycine max
  unsure (1)..(132): unsure at all Xaa locations
  Clone ID: PAT_MRT3847_97068C.1.pep
MDAAATGSELNKSGSGGSERSEDSGGGIFEYSGWVYHLGVNSIGHEYCHLRFLFIRGKYVSMYKRDPHDNPGLKPIRQGVVGPTLMVEELGRRKVNNGDLYVLRFFNRLDETNKGEIACATAXDARGWMEAF

SEQ ID NO: 282444 - protein, 312 aa, Glycine max
  unsure (1)..(312): unsure at all Xaa locations
  Clone ID: PAT_MRT3847_97069C.1.pep
MDAVATGSELNKSGSGGSERSEDSGGAGGGGIFEYSGWVYHLGVNSIGHEYCHLRFLFIRGKYVSMYKRDPHDNPGLKPIRQGIVGPTLMVEELGRRKVNNGDLYVLRFYNRLDETKKGDIACATAGDARGWMEAFDQAKQQAEYELSRGVSARDKLNMEAEINLEGHRPRVRRYAHGLRKLRSEAICPWVEEXIRIGQGPEKLLRQSSKLAIRPDGFEGDSGDAVEAHQWKCVXSVAGIRIFEDVSDHKNGKAVLAKSVGVIDATADTVFEVILSTEQQKRYEWDTLMCDLELIDSYDGHYDVVYGTYDSK

SEQ ID NO: 282445 - protein, 41 aa, Glycine max
  Clone ID: PAT_MRT3847_9706C.1.pep
LRNDNDQNHIKNRWLYFIMRLEILVAKFVLEQKRKSKFSFH

SEQ ID NO: 282446 - protein, 97 aa, Glycine max
  Clone ID: PAT_MRT3847_97070C.1.pep
LRSMRIKKTAEDRDPCTYITSSTSNLDFFKEDNLSTVTYFKHLINNFHLSLFLFSYHVISLIIPIFFSFFTLSRCQKSFFFFKYMNGKMHSYFNLLL

SEQ ID NO: 282447 - protein, 78 aa, Glycine max
  Clone ID: PAT_MRT3847_97071C.1.pep
FFFFFFSFFFFFFFFFFFFFFFPSPKKEGQGLIFFFERVLKRPKLNGGGRGPGKKKNGLLVGTRKMANTGPISPLKDP

SEQ ID NO: 282448 - protein, 84 aa, Glycine max
  Clone ID: PAT_MRT3847_97072C.1.pep
MVVSASEPVSSAAVVEACRDYQIKTPSINIARNKSYKKPPYNLENTNNFCAITVAPPVVTAPIVHPLYPAAEGKKETTTLPKRK

SEQ ID NO: 282449 - protein, 108 aa, Glycine max
  Clone ID: PAT_MRT3847_97073C.1.pep
MSLPDCPAVQLAQLLGPNTTNAAAAASFICDRFTAVDNKFVDTAFAVDNTYLLFSAYLVFSMQLGFAMLCAGSVRAKNTMNIMLTNVLDAAAGGLFYYLFGFAFAFGS

SEQ ID NO: 282450 - protein, 123 aa, Glycine max
  Clone ID: PAT_MRT3847_97074C.1.pep
VLAKLLVDTVNLGILLTVLSGISRGLTNGVKGEGSTINTMIVSRILSHLKLRYRHLLRLRNLTIQALRYSLLHRDRPGLSRGEALLSVLYLYSLCHVSFYFLESPAIIFSRPCKHINPSNGSK

SEQ ID NO: 282451 - protein, 41 aa, Glycine max
  Clone ID: PAT_MRT3847_97075C.1.pep
AVPLFFIISVFAQSFCFCLYAFSLICQMMNLSKLLRTQTSI

SEQ ID NO: 282452 - protein, 102 aa, Glycine max
  unsure (1)..(102): unsure at all Xaa locations
  Clone ID: PAT_MRT3847_97076C.1.pep
EVEKRKKTKMEKYQMWCRRRVLVTFAYALLFXQSXADDVVVLXKITSRIELCQDIGALVEFYAPWCGHCSKLAPEYVKLGSSVTMAKAVLIGQVDCDEHNSL

SEQ ID NO: 282453 - protein, 36 aa, Glycine max
  unsure (1)..(36): unsure at all Xaa locations
  Clone ID: PAT_MRT3847_97077C.1.pep
RTSLHLTNISCCLERIRIKTXVRHGWYYQDPLLQCD

SEQ ID NO: 282454 - protein, 78 aa, Glycine max
  unsure (1)..(78): unsure at all Xaa locations
  Clone ID: PAT_MRT3847_97078C.1.pep
DMAFNSIDSTIHDXXFLNSGPWAPPPXPPPLPPAQFQRMRTYTKVYKRGXVGRSIDITRYSRLPLKRIPPKCKGQKEV

SEQ ID NO: 282455 - protein, 322 aa, Glycine max
  Clone ID: PAT_MRT3847_97079C.1.pep
MIVLHLFAAPLPSCTTITCSKHFSHDNHFVRSSTVPRLSLSHVRTRIFLCSARNRQKDLNGRDFSIDIVKEDQELEDDGDDGFLAQGMYARRDAKDIDEEEAQENEDDDSGYSGRGPYTGRPGKDYDRDPELGNILGSFLEDPQAAQSKLEDRLRKKRSKILHTKTGSGKPMKVSFNKFDFSNSYIWFEFYNVPLTKDVSLICDTIRAWHIIGRLGGCNAMNMQLSQSPMDARPSYDYIQGANVEPTTFYNIGDLELQDNLARIWVDIGTVEPLLLDVLINALTQISSDFVGIKQVMFGGSEFENWNDSLKSEDAGYGVHKI

SEQ ID NO: 282456 - protein, 119 aa, Glycine max
  unsure (1)..(119): unsure at all Xaa locations
  Clone ID: PAT_MRT3847_9707C.1.pep
LFVSDHISSPDCNILGAKLQDDTDHTNSENADSSLLVAPFKGGWFIRVVSFSKTIEQIVPHMNTRTQLLSTTTNGDXVQGKDLSMVKGNVXCADDGLTSINTPTPLMESCLQKDRGLIV

SEQ ID NO: 282457 - protein, 40 aa, Glycine max
  Clone ID: PAT_MRT3847_97080C.1.pep
IFLTHSREGEECLSKFGPCKTGQHTCVFPIKELGQLLVSS

SEQ ID NO: 282458 - protein, 85 aa, Glycine max
  unsure (1)..(85): unsure at all Xaa locations
  Clone ID: PAT_MRT3847_97081C.1.pep
DQPSTCDRRNTEVVANSQTSPNLQHLRPRAPAPHLWRLPRSPSSTFPTTILTPPSPPPRSPPAPXPPPRPFXRTSSPAPFPAPSP

SEQ ID NO: 282459 - protein, 71 aa, Glycine max
  Clone ID: PAT_MRT3847_97082C.1.pep
YGCEKTTEGDHPPNQSKFMHTRHTHSLLIFPQLSKQVRFSLSLTKNASDDPQLNQEHSYPLLKHTNSLTTK

SEQ ID NO: 282460 - protein, 169 aa, Glycine max
  Clone ID: PAT_MRT3847_97083C.1.pep
GNAVFNFVVTAYSKAGEMGKAVEMMRLMESRGLRPDVYTYTVLASAYSNGGEMEEAQKILAEAKKKHVKLGPVMFHTLIRGYCKLEQFDEALKLLAEMKDYGVRPSVDEYDKLIQSLCLKALDWEMAEKLQEEMKESGLHLKGITRGLIRAVKEMEKEVVEAESITAVV

SEQ ID NO: 282461 - protein, 66 aa, Glycine max
  Clone ID: PAT_MRT3847_97084C.1.pep
NTNRADFIPKTRLMQDLIFFMCSNAPVVVKDLLSVYRLISYYDCNLSCQKQEAITYVKKKNKGRRL

SEQ ID NO: 282462 - protein, 163 aa, Glycine max
  Clone ID: PAT_MRT3847_97085C.1.pep
MEFASSSSPFSKSKTQWMYDVFINFRGEDIRKNFVSHLHSALLHAEVKTFLDDENLLKGMKSEELIRAIEGSQIAVVVFSKTYTESSLCLRELEKIIESHETRGQRVLPIFYEVDPSDVRQQKGDFGEALKAAAQKGFSGEHLESGLSRWSQAITKAANLPGW

SEQ ID NO: 282463 - protein, 111 aa, Glycine max
  unsure (1)..(111): unsure at all Xaa locations
  Clone ID: PAT_MRT3847_97086C.1.pep
FDACVFLIIDPTTGGYEAGIYKDGQTREHALISFNLGEKLPICCCNKLDASTPNIFKARFDDIMKDVPSYLKKVGYSLVXNRLVPIFGFEGDNIXDRATKLDWIKDTTMLD

SEQ ID NO: 282464 - protein, 62 aa, Glycine max
  Clone ID: PAT_MRT3847_97087C.1.pep
TGICAFHEELSCLVEREAHVRFPSFIAPFSFGDLPLESVGLRFTLKNVTHYKKNIIYISKIL

SEQ ID NO: 282465 - protein, 123 aa, Glycine max
  Clone ID: PAT_MRT3847_97088C.1.pep
DIPAKRLYCFFSSLYSVLVRGGRAVLQLYPENSEQLELITTQATRAGFTGGVVVDYPNSAKAKKFYLCLFSGPSTSLPEGLSEDTEEEKPAESTFTADRIPYRIARRGVVRKSREWVLEKKAR

SEQ ID NO: 282466 - protein, 35 aa, Glycine max
  Clone ID: PAT_MRT3847_97089C.1.pep
SQIRLMAYNVNKDLGPMKSTVHSYNVYIWIYAELA

SEQ ID NO: 282467 - protein, 113 aa, Glycine max
  Clone ID: PAT_MRT3847_9708C.1.pep
MDEAEFQRLLQLFPVVRSRDYTAEATSSRQIASGSAQNEIKEWQDAWDERDKDFEKQGINQQDSFWSKLKSEAARKVGAEEAERFCKAFQQIHKKLVNEELSLDAARSFLNSS

SEQ ID NO: 282468 - protein, 200 aa, Glycine max
  Clone ID: PAT_MRT3847_97090C.1.pep
IFAASLPTSHPSFAPQMHLELLPQWKAPPLQNVNVELFIGILSAGNHFAERMAVRKSWMQHKLIQSSRVVARFFVALHARKDINVDIKKEAEYFGDIIIVPYMDHYDLVVLKTIAICEYGIRTMTSKYIMKCDDDTFVRVDSILNEARQVRSRSLYMGNMNYHHRPLRHEKWAVTYEEWVEEEYPIYANGPGYIVSADIA

SEQ ID NO: 282469 - protein, 86 aa, Glycine max
  Clone ID: PAT_MRT3847_97091C.1.pep
TIDVLYESGIDRAQPDAFLEVGDSREYPVSLSVFDELEKRYSDWTNCSRSERRLLFDRINLGIISIYEQFTSVQPWVSSTTSLNLC

SEQ ID NO: 282470 - protein, 70 aa, Glycine max
  unsure (1)..(70): unsure at all Xaa locations
  Clone ID: PAT_MRT3847_97092C.1.pep
FLPIFKKKSVPQKRFPSPQKTPDSLFPPLQHRSKFDTQLECGEFFLSHKRKSANMXQEKQEKQFEKSFEN

SEQ ID NO: 282471 - protein, 153 aa, Glycine max
  unsure (1)..(153): unsure at all Xaa locations
  Clone ID: PAT_MRT3847_97093C.1.pep
MPTPVSTARQCLTDEAARALDDAVSVARRRSHAQTTSLHAVSALLSLPSASLRDACSRCRNCSYSPRLQLRALELSVGVSLDRLPTTKSSGGGGGGEEGPPVSNSLMAAIKRSQANQRRHPDSFHLMQMMQQQQQTTSLLXVELKHFILSILD

SEQ ID NO: 282472 - protein, 266 aa, Glycine max
  Clone ID: PAT_MRT3847_97094C.1.pep
MTLLSSLCSCPLIPFSSSFPLTSSNLYGFSNIFRTQIQSSAATNICTQKIDTTLLTIAESFYEDELWAAACLRVRSFNQFRPDAFGILDHTRYLAEREFEALKERVSGKRMGFRRVSCINASLPLSHIATLSDDLCSSCKFSTNGEDRIVVGTLDLNQCLSLPDEIVGAKPEVIGADITRAYLSNVCVAKELHRNGLAYALLEKSKLVAYDWGITDLYVHVAVDNEPAKKLYIKSGFVYESDEPAWQARFLDRPRRLLLWSGFSRT

SEQ ID NO: 282473 - protein, 45 aa, Glycine max
  Clone ID: PAT_MRT3847_97095C.1.pep
VLFLVFFFFFLFLGFLFFYLFSVYLVSGFSFYYYAPLIYFCLLVL

SEQ ID NO: 282474 - protein, 39 aa, Glycine max
  Clone ID: PAT_MRT3847_97096C.1.pep
SVICINFLPKHKCTTINFILNEQKVMVFHSKVKHKISLS

SEQ ID NO: 282475 - protein, 473 aa, Glycine max
  Clone ID: PAT_MRT3847_97097C.1.pep
MTMKDSIVLYSALGRGHLVSMVELGKLILSHHPSLSITILFLTPPPNQDTPTSPTAFTCDATAKYIAAVTASTPSITFHRIPQISILTVLPPMALTFELCRATGHHLRRILSYISQTSNLKAIVLDFMNYSAARVTNTLQIPTYFYYTSGASTLAVFLYQTIFHETCTKSLKDLNTHVVIPGLPKIHTDDMPDGAKDRENEAYEVFFDIATCMRDSDGVIVNTCEAIEERVVEAFSEGLMEGTTPKVFCIGPVISSAPCRKDDNGCLSWLDSQPSHSVVFLSFGSMGRFSRTQLREIAIGLEKSEQRFLWVVRSEFEEGDSGEPPSLDELLPEGFLERTKEKGLVVRDWAPQAAILSHDSVGGFVTHCGWNSVLEAVCEGVPMVAWPLYAEQKLNKVILVEEMKVGLAVKQNKDGLVSSTELGDRVMELMDSDKGKEIRQRIFKMKISATEAMAKGGSSIMALNKLVELWREH

SEQ ID NO: 282476 - protein, 259 aa, Glycine max
  Clone ID: PAT_MRT3847_97098C.1.pep
MMGGAGIIVNTFEAIEEEAIRALSEDATVPPPLFCIGPVISSAPCRKDDNGCLSWLDSQPSHSVVFLSFGSMGRFSRTQLREIAIGLEKSEQRFLWVVRSEFEEGDSGEPPSLDELLPEGFLERTKEKGLVVRDWAPQAAILSHDSVGGFVTHCGWNSVLESVCEGVQMLEWPIYAEQKMNRMVMVKESKVALSVNQNKDGFVSSTELGDRVRELMESDKGKEIRQRIFKMKMSAAEAMAEGGTSRASLDKLAKLWKQS

SEQ ID NO: 282477 - protein, 71 aa, Glycine max
  Clone ID: PAT_MRT3847_97099C.1.pep
ATVETLPASKLRESTRRSFAHDTFRSLSFRFFSAVAFPVSISSSMLVRSASPDIFLQLALLYIYILSLLFF

SEQ ID NO: 282478 - protein, 56 aa, Glycine max
  unsure (1)..(56): unsure at all Xaa locations
  Clone ID: PAT_MRT3847_9709C.1.pep
GXHRXIXXXXLXXQNVXRQXXXDMXLRSDTYXLXXXTXXXSXPSXXXXXKTXXXXX

SEQ ID NO: 282479 - protein, 61 aa, Glycine max
  unsure (1)..(61): unsure at all Xaa locations
  Clone ID: PAT_MRT3847_970C.1.pep
XXRKLMFSVPFPPTXXPXXHFYSGRLFXXHHLFXXXXYFFFLSHPFSTILSNIYDFLNKTK

SEQ ID NO: 282480 - protein, 46 aa, Glycine max
  Clone ID: PAT_MRT3847_97100C.1.pep
FCIIHHSMRCRGERLQQKPQSYMTLQAFSSYITQELASGITRELST

SEQ ID NO: 282481 - protein, 44 aa, Glycine max
  Clone ID: PAT_MRT3847_97101C.1.pep
ILNCSCGWYNNILTNCFNDNAVLHLSVSYRHTYLPYDVANIVFI

SEQ ID NO: 282482 - protein, 78 aa, Glycine max
  Clone ID: PAT_MRT3847_97102C.1.pep
QEIAKCTTKYKGCSRGASKRSCTPKQGVQVRPARPKVLVDRRMIKYGKKHQKGKAVQVLYNRKVKAPQGQGYSTAYDQ

SEQ ID NO: 282483 - protein, 175 aa, Glycine max
  Clone ID: PAT_MRT3847_97103C.1.pep
MVTLFDSLAVVRLPTAAFSPAATSRTSVLLPHCAGLRLRPAAATRLVASPARRIASRAARVVCEAQDTAVEVAPITDANWQSLVLESESAVLVEFWAPWCGPCRMIHPIIDELAKQYAGKLKCYKLNTDESPSTATRYGIRSIPTVMIFKNGEKKDTVIGAVPKSTLTASIEKFV

SEQ ID NO: 282484 - protein, 81 aa, Glycine max
  unsure (1)..(81): unsure at all Xaa locations
  Clone ID: PAT_MRT3847_97104C.1.pep
PCIMXVXXXXXLEGRTLXEPIXSXXXXFXXLXSXGNXXRXXXXXPFYQKCKLHLITINFNTTSNNAXDYXIVXGXTAGVFX

SEQ ID NO: 282485 - protein, 138 aa, Glycine max
  Clone ID: PAT_MRT3847_97105C.1.pep
MGPKLAKTGSFRHGLAEKKDKLLSASAKSSSSYSEIGIDITTREEDEEQSWWNTFKRVAGKALEMGRSDPRKIIFSAKLGLALTILSLLIFLKEPFADLSSYCVWAILTVVVVFEFNIGATLSKGVNGGMGTMLAGGL

SEQ ID NO: 282486 - protein, 59 aa, Glycine max
  unsure (1)..(59): unsure at all Xaa locations
  Clone ID: PAT_MRT3847_97106C.1.pep
DLLKNGENLPXCCSFHSSSSLPYLSFNLIISFEFSLDYFPLFLPLTFSFLSFLFFLFSF

SEQ ID NO: 282487 - protein, 33 aa, Glycine max
  Clone ID: PAT_MRT3847_97107C.1.pep
MTICWGLCDDFSCIDQNKVSGLWSICVDTDAFS

SEQ ID NO: 282488 - protein, 211 aa, Glycine max
  unsure (1)..(211): unsure at all Xaa locations
  Clone ID: PAT_MRT3847_97108C.1.pep
LNLLSAVXGLNRXXAAXEDDLRXXDDAAKEXXAAGGLVDLSLGLDNLQGRWKLIYSSAXSSRTLGGSRPGPPIGRLLPITLGQVFQRIDILSKDFDNIVELQLGAPWPLPPLEATATLAHKFELIGSSKIKIVFEKTTVKTAGNLSQLPPLEVPRIPDALRPPSNTGSGEFEVTYLEFLVNATMHYAFSLLDLKKKRFQHLVPSFCLVFSS

SEQ ID NO: 282489 - protein, 245 aa, Glycine max
  Clone ID: PAT_MRT3847_97109C.1.pep
VVLRVRFYFSLNKSIIPCYQIIKGLVCSDKEVVSTLKHYKWSCSSRRLINHSVRNVGALRQLGVPQRSVSLLVTNHPGATFMKHSRFVEALEKVKEMGFDPLKSNFVMALKLFATINEATWKSKLEVLGRWGFSRDICLLAVKKQPQFMMSSEKKMMKMLNFLVKDMSLPPEDIARCPEILGCNLEKTVIPRFAVVKNLKSRGLIKSDLKTSSFIKISEKMFLERYVTRFQRNEPLLLDAYRGQK

SEQ ID NO: 282490 - protein, 129 aa, Glycine max
  Clone ID: PAT_MRT3847_9710C.1.pep
MCLFLFLFFMECYLATARGIVVLQKSEAAIPVTTLSPPEGNTTFIDGTTWCVALAGVSQADLQNALDWACGLGMADCTAIQHGGPCFEPDTLVSHASFAFNSYYQINGNSDIACQFGGTAALTKHNPNL

SEQ ID NO: 282491 - protein, 265 aa, Glycine max
  Clone ID: PAT_MRT3847_97110C.1.pep
MASLNLLPHPPLFSSFLHRPHCNTHLLLTPKPSQRRPSLVVKSTVGVADPSPSSSSYAGDTSDSISSLKLNLLSAVSGLNRGLAASEDDLRKADDAAKELEAAGGLVDLSLGLDNLQGRWKLIYSSAFSSRTLGGSRPGPPIGRLLPITLGQVFQRIDILSKDFDNIVELQLGAPWPLPPLEATATLAHKFELIGSSKIKIVFEKTTVKTAGNLSQLPPLEVPRIPDALRPPSNTGSGEFEVTYLDSDTRITRGDRGELRVFVIA

SEQ ID NO: 282492 - protein, 207 aa, Glycine max
  unsure (1)..(207): unsure at all Xaa locations
  Clone ID: PAT_MRT3847_97111C.1.pep
STVGVADSSPSSSGYAGNTSDSISSLKLNLLSAVSGLNRGXLEAGGGFVNLSLGLENLQGRWKLIYSSAFSSRTLGGSRPGPPIGRLLPITLGQVFQRIDILSKDFDNIVELQLGAPWPLQPLEVTATLAHKFELIGSSKIKIVFEKTTMKTAGNLSQLPPLEVPRIPDALRPPSNTGSGEFEVSYLDSDTRITRVDRGELRVFVIA

SEQ ID NO: 282493 - protein, 155 aa, Glycine max
  Clone ID: PAT_MRT3847_97112C.1.pep
MAHLLTPTPTTAATALSARARKSPLYSLKNVYFPTSRVCCVGHQYQQSHPSSLSDLDQVPPPGGNHSLRRRTLMGLSGAATLGLSLSDEQSARGAARRPPPPPPTEKKDPNVSGVQAKVLASKRRKEAMKEEVARLIERGKPVSLLLHHTPAAPE

SEQ ID NO: 282494 - protein, 50 aa, Glycine max
  Clone ID: PAT_MRT3847_97113C.1.pep
HLNYQEKSWCRYNITVQQIDSGQYEPASKPHTHRTFYHQPKLKISFSPKD

SEQ ID NO: 282495 - protein, 76 aa, Glycine max
  unsure (1)..(76): unsure at all Xaa locations
  Clone ID: PAT_MRT3847_97114C.1.pep
MASSQEDVTLLGVIGNPFACRVKIALKLNGVDYKYAEXNLANKSDLLLKSNPVHKKVPVFIHNENPIPESLVTVDY

SEQ ID NO: 282496 - protein, 48 aa, Glycine max
  Clone ID: PAT_MRT3847_97115C.1.pep
KFISLLMWKNRQTKSFLERHVLPGMSQHYRNLTKKNILAMEVHLDTKE

SEQ ID NO: 282497 - protein, 81 aa, Glycine max
  unsure (1)..(81): unsure at all Xaa locations
  Clone ID: PAT_MRT3847_97116C.1.pep
RFLNAVLLSYHSLLQLSPSASFTKVVLHDSAFFLQRLLYLSSNISEIGKRCERGENRFWXYTRLGFKTPRESISRRYIHKK

SEQ ID NO: 282498 - protein, 46 aa, Glycine max
  Clone ID: PAT_MRT3847_97117C.1.pep
RLLKRLTTISPCFCYLLHDKKDSQWVWGYCNPGRTHMIEIFSIVEG

SEQ ID NO: 282499 - protein, 316 aa, Glycine max
  unsure (1)..(316): unsure at all Xaa locations
  Clone ID: PAT_MRT3847_97118C.1.pep
VDDIEGSACSHPMVLVQIPMCNEREVYEQSISAVCQIDWPRDRLLIQVLDDSDDESIQWLIKTEVRKWSQKGINIIYRYRLVRTGYKAGNLKSAMSCDYVKDYEFVAIFDADFQPHPDFLKQTVPYFKDNPELGLVQARWAFVNKDENLLTRLQNINLCFHFEVEQQVNGAFLNFFGFNGTAGVWRIKALEESGGWLERTTVEDMDIAVRAHLNGWKFIFVNDGXVLWEVPEYYEAYRKQQHRRHSSPMQLFRWCLPAMMRSKISPCEKGNVILLFYLLRKLILTCYSLSCVCIERAIXMIRHEAKLPVWVICYIP

SEQ ID NO: 282500 - protein, 43 aa, Glycine max
  Clone ID: PAT_MRT3847_97119C.1.pep
VLLNHSKLFFDQKSNQSLFVSMTFPLTFFFSFPFFFIGRKTQV

SEQ ID NO: 282501 - protein, 91 aa, Glycine max
  Clone ID: PAT_MRT3847_9711C.1.pep
MYGEIERFIKVWISAILGLCYCYYIAARIPKGFLRLLSLLPILYLFIILSLNISSPSLVGYTFFFLVQLGMLKLILFCFHKGPLALSPRTL

SEQ ID NO: 282502 - protein, 63 aa, Glycine max
  Clone ID: PAT_MRT3847_97120C.1.pep
LALLLLTWSTRAKAEFLPSIQVHSWPSSKTSSSRHAHRKNLSKQLDSSFRRIPPSKSNPSQNK

SEQ ID NO: 282503 - protein, 40 aa, Glycine max
  Clone ID: PAT_MRT3847_97121C.1.pep
LALIYIFKRVMIYKYLYHKHTFIYLTSLFSLYLTFYQIYH

SEQ ID NO: 282504 - protein, 94 aa, Glycine max
  Clone ID: PAT_MRT3847_97122C.1.pep
GASGKHFCLSLCLLFHACFVRAGTVQSANFFFFPSNMFFSSFLLPNRCMCNFALSMVRSPLGFLFFFGGRLLPVNFKASARSLVFDNSPFFFFP

SEQ ID NO: 282505 - protein, 51 aa, Glycine max
  Clone ID: PAT_MRT3847_97123C.1.pep
MLLRCAQLYRLVDVAPHYYDLSNFPQCEAKRVLERLYKKREKEKEEARSRK

SEQ ID NO: 282506 - protein, 124 aa, Glycine max
  unsure (1)..(124): unsure at all Xaa locations
  Clone ID: PAT_MRT3847_97124C.1.pep
GSDEEIRKGQRAEGRDTAMAIGTDTTPKWGEQSTYADDYDRIIFFLHKTEAKEKIKCMCDKRTRKKRYMEXNEEILKENRGEGGXMEPGVDARQDKEDREGQKGGKKEANKGSKGEWMKQGQEK

SEQ ID NO: 282507 - protein, 147 aa, Glycine max
  Clone ID: PAT_MRT3847_97125C.1.pep
EEMARESYQESITSLTKLLSEKAKLNGITAAKIKELTAELDTTGSKPGNPEEMIRTRFIHFKNEKFKKNPYLYGKLAKSQSPKFIVFTCSDSRIYPSHILNFQPSKAFIVRNITNMIAPYYKTKYSAAITSIKYTVLHVKVENMVVL

SEQ ID NO: 282508 - protein, 116 aa, Glycine max
  unsure (1)..(116): unsure at all Xaa locations
  Clone ID: PAT_MRT3847_97126C.1.pep
GSSAMSHCMLGLATEITLTVRYLTQMLYYALHYGAATMYSGAPNVMGWVPSHTVTGGXMYNSSEEXAWNVTVADSDPVTLAQYHAWRRCGELVHYGETCAVSLDSLTCRCCEARST

SEQ ID NO: 282509 - protein, 72 aa, Glycine max
  Clone ID: PAT_MRT3847_97127C.1.pep
LHPDPVFFFSHKMIFPLNLKLPSRGVLKILVRRPFIFARYQNFNQYLEPLINEYLAIAFKIPCYFHRGFLVL

SEQ ID NO: 282510 - protein, 313 aa, Glycine max
  Clone ID: PAT_MRT3847_97128C.1.pep
MAKSIKFFELNTGAKIPSLGLGTWQAEPGVVAEALTTAIQVGYRHIDCASAYKNQAEIGSALKKLFDDGVVKREDLWITSKLWCSDHAPEDVPKALDKTLQELQLDYLDLYLIHWPVRMKSGTFGLNKEYLEQPDIPNTWRAMEALYDSDKARAIGVSNFSSKKLQDFLDIARVLPAVNQVELHPGWQQPKLRAFCESKEIHLSGYSPLGSPAALKSDILKNPVVTEIAERLGKTPAQVALRWGLQAGHSVLPKSTNESRIKGNFDIFDWSIPQDLMTKISEIKQERLVKASFFVHETYGAYRSIEDFWDGEL

SEQ ID NO: 282511 - protein, 144 aa, Glycine max
  Clone ID: PAT_MRT3847_97129C.1.pep
GDIPSSCWTRMQHQDKEEFHGELTGEATMLGPKETARRSPEGNTPRDGNSSKVGPLPKQGSAKGEESAKETNPHVGETQVMAAIPVADGLSDGTRETLQTTEEQEKSSWSENLDQSQNFGAERVEPVRLTPGWHAGSEPRDKAS

SEQ ID NO: 282512 - protein, 70 aa, Glycine max
  unsure (1)..(70): unsure at all Xaa locations
  Clone ID: PAT_MRT3847_9712C.1.pep
NLFHKKSPGNTYRHVSKCIFXHXQHIIHYNNSYSTIYPSHSLFSIATYPFITSLINVSLSFYTFCLSLIL

SEQ ID NO: 282513 - protein, 63 aa, Glycine max
  unsure (1)..(63): unsure at all Xaa locations
  Clone ID: PAT_MRT3847_97130C.1.pep
VLLKSANKSRFKGNFDIFDWSIPQDLMTKISRFKQXELVKASFFVHETYGAYRSIEDLWDGEL

SEQ ID NO: 282514 - protein, 87 aa, Glycine max
  unsure (1)..(87): unsure at all Xaa locations
  Clone ID: PAT_MRT3847_97131C.1.pep
SSSXXSVXQKKXLXSPPSSSSXPXPLPXXXXXAPXXXXWCCLXXARXXXPPXXRVSSALSXLWFGAAAASLSLGSLKFRSXRVGRAL

SEQ ID NO: 282515 - protein, 59 aa, Glycine max
  Clone ID: PAT_MRT3847_97132C.1.pep
HNPIKYSRTITSKSMFAPSCSHTVQHYLVYHEALITYSIPKETQLSSRILKPTSCDHIY

SEQ ID NO: 282516 - protein, 136 aa, Glycine max
  Clone ID: PAT_MRT3847_97133C.1.pep
PQSKKRVLTHTPSTRRSTCGKYRGVRQRKWGKWAAEIRDPFQCTRIWLGTFNTAEEASKAYETRRLEFEAMAKTQTLKTGSEPLSTTSDKSNCCNSSAAAAADVSVSEKFSTTSDDSEESMLSHNSPSSVLELDTS

SEQ ID NO: 282517 - protein, 189 aa, Glycine max
  unsure (1)..(189): unsure at all Xaa locations
  Clone ID: PAT_MRT3847_97134C.1.pep
KVGFNGNGNGHGVSAVAPVNEEKEGEEGNGDVKVNVFPEGEEVGDGGWQGPLGLKCGLKENPGIVSLIYYGLQHYLSLAGSLVLIPLVMIPVMGGTDKDTATVISTMLFLSGITTILHSYFGTRLPLVQGSSFVYLAPALVIINAQEYRNLTEHKFRHIMRELQGAIIVGXSVFQCIPGNLGGLMFYSN

SEQ ID NO: 282518 - protein, 41 aa, Glycine max
  Clone ID: PAT_MRT3847_97135C.1.pep
GSVGAACLCLRGYLVKEGLVQKLAAVTMSSTSLKEMRNGGE

SEQ ID NO: 282519 - protein, 41 aa, Glycine max
  Clone ID: PAT_MRT3847_97136C.1.pep
QHRCLQWHLVWFRVVLPWSSQDGRRVILQVNWLRIKLMRHR

SEQ ID NO: 282520 - protein, 130 aa, Glycine max
  Clone ID: PAT_MRT3847_97137C.1.pep
MLDQFIFTVEAAQKAPWRIQVLFSVECQNYFDWQTVGLMHSFRKAKQPGHITRLLSCTEEQKKTYRGMHLAPTFEVPSMSKHPTTGDWYPAINKPAGVLHWLKHSKDAENIDWVIILDADMIIRGRIVPW

SEQ ID NO: 282521 - protein, 87 aa, Glycine max
  Clone ID: PAT_MRT3847_97138C.1.pep
LWEQLRLGFGVTENRNLSLPPHVVASRPSIASHWCAVLLLIIMLTLNGMLSRCYHRYSVLSSRRFFYSFGPPDAFLSHQFLASHGIL

SEQ ID NO: 282522 - protein, 696 aa, Glycine max
  Clone ID: PAT_MRT3847_97139C.1.pep
DIDEVKNILKNCGYHPEIGIDILIERCLVTLDRMKKLGMHDLLQEMGRNIVFQESPNDPGKRSRLWSQKDIDYVLTKNKGTDEIQGIVLNLVHSGDYEGRWSTEAFSKTSQLKLLMLCDMQLPRGLNCLPSSLKVLHWRGCPLKTLPLNNKLDEVVDLKLPHSRIEQLWRGTKLLEKLKSINLSFSKNLKQSPDFGGAPNLESLVLEGCTSLTEVHPSLVRHKKLAMMNLKDCKRLKTLPSKMEMSSLKDLNLSGCSEFKYLPEFGESMEHLSVLSLEGTAIAKLPSSLGCLVGLAHLYLKNCKNLVCLPDTFHNLNSLIVLNVSGCSKLGCLPEGLKEIKSLEELDASGTAIQELPSSVFYLENLKSISFAGCKKPVSNSVSGFLLPFQWVFGNQQTPTAFRLPPSKLNLPSLMRINLSYCNLSEESFPDGFRHLSSLQFLDLTGNNFVTLPSCISNLTKLEILLLNLCKKLKRLPELPSRMKHLDASNCTSLETSKFNPSKPCSLFASSPSNFHFSRELIRYLEELPLPRTRFEMLIPGSEIPSWFVPQKCVSLAKIPVPHNCPVNEWVGFALCFLLVSYANPPEACHHEVECYLFGPNGKAIISSRNLPPMELDCPHLYILYLSIDKYRDMICEGVVGSEIEFVLKSYGCQSLEIVRCGCRLVCKQDVEDIYENSIISSSEEIGVASEKVRII

SEQ ID NO: 282523 - protein, 230 aa, Glycine max
  Clone ID: PAT_MRT3847_9713C.1.pep
MASSSSSFSLLRSIPISFPHTQCALKSPRLSLRASATPSQKARFVARRKESLSVRQLQRPLIEYMRLPASQYSVLDAERIERVNENTFRCYVYRFKFFNFEVCPVLLVKVEEQPDGCCIKLLSCKLEGSPMVAAQNDKFDALMVNRISCDSNANRSLMQQLTSDTIIEVSIEIPFPFQAIPKQAIESAGTQVLEQILRIMLPRFMSQLEKDYQAWASGDTSRQPLGTGEI

SEQ ID NO: 282524 - protein, 134 aa, Glycine max
  Clone ID: PAT_MRT3847_97140C.1.pep
MAKAAEKKPAAEKAPAEKKPKAEKKVPKEGSGGEKKKKRSKKSVETYKIYIFKVLKQVHPDIGISSKAMGIMNSFINDIFEKLAQEAARLARYNKKPTITSREIQTAVRLVLPGELAKHAVSEGTKAVTKFTSS

SEQ ID NO: 282525 - protein, 48 aa, Glycine max
  Clone ID: PAT_MRT3847_97141C.1.pep
SWTLGNITVSQIHDNEDTRNIVTCTCKIFEHCNAEEKQWASSYCNTSG

SEQ ID NO: 282526 - protein, 81 aa, Glycine max
  Clone ID: PAT_MRT3847_97142C.1.pep
AATTNKQKHECPSTGFQITRREVDKIVLSDISQKQHIFIEKEKLEEQNTCGIHNKGLAQLQEQINSDKKTLYNKDRCHYFN

SEQ ID NO: 282527 - protein, 50 aa, Glycine max
  Clone ID: PAT_MRT3847_97143C.1.pep
MLEQPNKTLLNYIKNKTFTTLLITNNFYTIILFTKASSLISVFLPKYLVT

SEQ ID NO: 282528 - protein, 383 aa, Glycine max
  Clone ID: PAT_MRT3847_97144C.1.pep
MPLHHHLFLEETKMAHRYPKPLLDTLYCLEDHIHWEEEEQVDYNEYSNTTTTNTNSSNVVLLEHDLFWDHEELPSLLAKEHQNQLSNTLLQNNLVLASSREEAVEWILKVNARYSFSTLTAVLAVNYLDRFLFSFRFQNDNNDNNNNNNPWLTQLSAVACLSLAAKFEETHVPLFIDLQVEESKYLFEAKTVKRMEILVLSTLGWKMNPVTPLSFLDYITRKLGLKGYLCWEFLRRCETVLLSVFADSRFMGYLPSVLATATVMRVVNTVEPRLGVEYQDQLLGILGIDKEKVEECYNLMMEVVSGYDEEGKRSKLKKRKLESIIPCSSQNGVMEGSFSCDSSSNESWELGASSVSSSSKKTRTQDQLLLNHSNSSDFISIPR

SEQ ID NO: 282529 - protein, 77 aa, Glycine max
  Clone ID: PAT_MRT3847_97145C.1.pep
LFNPDSDLIVCLETPLAQRARRAHKDVSWLCDHAKGMLPTNRCAQRLYKLVDHAILSERNQYANAMSSLHEATGSNV

SEQ ID NO: 282530 - protein, 146 aa, Glycine max
  Clone ID: PAT_MRT3847_97146C.1.pep
MGNANSCSCICIPNGAILKKIRKGTKTAMLLDSDENPREIKLPATSGELMIQEFGHVITPVDELRRTGRVSALLADEELVAGKVYLLLPVNRVNSKASEFEMALAEKQSGHTKRTRGNNMAKVSPSVCPRFGNQVRWNPVLDPIFE

SEQ ID NO: 282531 - protein, 106 aa, Glycine max
  unsure (1)..(106): unsure at all Xaa locations
  Clone ID: PAT_MRT3847_97147C.1.pep
LXHXXYYHCHCHYXPGHSIIGXTXLSXXXEYXSXFCXXXDAXHXICSXWWPSXYXTXTXIXNXXXGSSXXSXSSXCCWXXKKKXKMMMLLLLLQXSSPNSRAYVXV

SEQ ID NO: 282532 - protein, 95 aa, Glycine max
  Clone ID: PAT_MRT3847_97148C.1.pep
DKAVMCHRLNDRTAVLYCHEVRETTGLMGTLTAGDGTKTQALAICHSNTSGMNHQMLHQLMGVDPATNPVCHSLGGEAIVWVPDLSVDTVYQTNI

SEQ ID NO: 282533 - protein, 66 aa, Glycine max
  Clone ID: PAT_MRT3847_97149C.1.pep
LEQTSDFFLLFGDRRLTGKTITLCADHSLWEALYTPLSEYRLNTLLYDMGLRDTLKLYMLPSQLTG

SEQ ID NO: 282534 - protein, 35 aa, Glycine max
  unsure (1)..(35): unsure at all Xaa locations
  Clone ID: PAT_MRT3847_9714C.1.pep
SLTPVXSLMDMDFKLXCTGVSDXRIAPIRRPYTAL

SEQ ID NO: 282535 - protein, 36 aa, Glycine max
  Clone ID: PAT_MRT3847_97150C.1.pep
LFHHYEKRLCQDVCCYVIPPMQFKRYWLVEFVCVCI

SEQ ID NO: 282536 - protein, 75 aa, Glycine max
  Clone ID: PAT_MRT3847_97151C.1.pep
QCFTFSGAQKLKRSDLEAACEDFSNVIGNSPIGILYKGTLSGGVEIAVAFVSITSSKNWSKTLEAQFRSKVRQLS

SEQ ID NO: 282537 - protein, 68 aa, Glycine max
  Clone ID: PAT_MRT3847_97152C.1.pep
VEVKIRYVSESESMCCSLYFPSTLTVNRYTNARCCCCDGFLSLSFRHILFLCFYSLTLGSLALCCDVK

SEQ ID NO: 282538 - protein, 55 aa, Glycine max
  Clone ID: PAT_MRT3847_97153C.1.pep
EEDAPSQLYTIHSSDASMQAFTHNLIVNAPLQPARTPHELDSGQLACYYQAPYIT

SEQ ID NO: 282539 - protein, 203 aa, Glycine max
  unsure (1)..(203): unsure at all Xaa locations
  Clone ID: PAT_MRT3847_97154C.1.pep
GQSGPLSRPGVGVGAEISGGGGGDPQTRPFFFPPFSPPKKVFSPLGPTNGGPFFHLFXGQGVKGHPLLPVPLVKKKTPLGAKKQTPPPRGVGGFFIHRGPQVFPLENGPLGPPHLFGLAPPFGPPGFSLFSSGLFFFWNFEGKTIFPRKTLFPFFPPAFKSPPFWKNGSPPGPGPEFPGGPPGPKTFYVKFGGVNKKVFAFFF

SEQ ID NO: 282540 - protein, 148 aa, Glycine max
  Clone ID: PAT_MRT3847_97155C.1.pep
EAGSSATYPMQCSALRKNGHVVIKNRPCKIVDMSTSKTGKHGHAKVHLVAIDIFTGKKLEELSPSTHNMDVPHVSRKEYQLLDIQDDGFLSLMSEDGTMKDDVKSPEGEIGAKIEKLFRDEEKDTNVIILTAMGEETAIEAKEAPRGA

SEQ ID NO: 282541 - protein, 63 aa, Glycine max
  Clone ID: PAT_MRT3847_97156C.1.pep
NISFRCHILQVSDVPCISIRSIKQEPLTFIYPICSLVELHRPYVSLHKTTNGYDLKSLVKIWW

SEQ ID NO: 282542 - protein, 37 aa, Glycine max
  Clone ID: PAT_MRT3847_97157C.1.pep
CYLHIWLHYSLSVFDTVLFMVMVSKRMSFNINPSYFC

SEQ ID NO: 282543 - protein, 68 aa, Glycine max
  Clone ID: PAT_MRT3847_97158C.1.pep
PGPPLFGGAAISVLWALSTALVPSMQRGSGTAKSFPLALNTFNGLLFVSQLPPGFDLLLKGFEFPNRP

SEQ ID NO: 282544 - protein, 52 aa, Glycine max
  Clone ID: PAT_MRT3847_97159C.1.pep
FLSHLAPFDTIMFIHLLVCVVAPCPFVVLAVRCSLCLHLKTPASAYSSSYAW

SEQ ID NO: 282545 - protein, 76 aa, Glycine max
  unsure (1)..(76): unsure at all Xaa locations
  Clone ID: PAT_MRT3847_9715C.1.pep
TPDCNGDGRTMKKESNDLSENSGTPTHDKDXVKRLXRTDANGDSRADTDEPGESHXITTDECDNDEDTREVPNAPD

SEQ ID NO: 282546 - protein, 108 aa, Glycine max
  unsure (1)..(108): unsure at all Xaa locations
  Clone ID: PAT_MRT3847_97160C.1.pep
ILFFTXEXRXXKALSTHKTAVTTAQYSRLSLLILIITLMIGQLSSCCKAGRWMSKEIKQKENSSSSQQSSISWHFYTKTQQVPSTEEVHPIYGASLRDVPGGPNPLHN

SEQ ID NO: 282547 - protein, 43 aa, Glycine max
  Clone ID: PAT_MRT3847_97161C.1.pep
VGLWPGLFWLLNLPFGTNRSRVTLIYNYSDTPGSQRRPKLVRN

SEQ ID NO: 282548 - protein, 58 aa, Glycine max
  Clone ID: PAT_MRT3847_97162C.1.pep
WLTIVSHAPAWLLRSVKLTCQESNPGRRRKGCTSHAPTSCLMDRKLTSVLMLLCTSCW

SEQ ID NO: 282549 - protein, 286 aa, Glycine max
  Clone ID: PAT_MRT3847_97163C.1.pep
MVRGGRFSGKRNFRKRVRSKEGGSDDSDEDYVVSDEGREASDYYCSSLDGCASEEGFDSFMEEEEEQFRRVRSINRSKSKKGIAGRRKNGSKSSHRRGRITYAEEEDVEEEEEEEEEFEDEEEEDEDEEEYKEEEEEEESQEARNFKRSKAKNGVCGKKKRAGKISPKRGRKIRAEQLEEEEEEEEEEKQVEEEEEEKVERSGAEEEEPEGDRDGEDEDFEYDDEDDEFLPEEEEYSDEEEMGGRNKKNEGVKMEKKVLQKKRASVVSTRGRKRRSSRASKKPLGN

SEQ ID NO: 282550 - protein, 76 aa, Glycine max
  unsure (1)..(76): unsure at all Xaa locations
  Clone ID: PAT_MRT3847_97164C.1.pep
RIAFHGSISICVIKSLICSWFGAKIAEGMLPPTALLRVLNLLSKVMPKAKLFPHKDLSALTXREPGRRKVVVCSGP

SEQ ID NO: 282551 - protein, 208 aa, Glycine max
  Clone ID: PAT_MRT3847_97165C.1.pep
MEEEEEEFRRVRSLNRSKSEKGIAGRWKNGIKNSYKRGRITYEEEEEEEEVEEEFEEEEEEEIQEVRNFNRSKAKNGVCSKKKRAGKISPKRGRKIRAEHLEEEEEEEEEKQVVEDEEEEKVERSGDEEEEPEGDRDGEDEDFEYDDEDDEFLPEEEDYSDEEEEMGGRKKKNDGVKMEKEVLQKKRASVVSTRGRKRRSSIASKKPL

SEQ ID NO: 282552 - protein, 287 aa, Glycine max
  unsure (1)..(287): unsure at all Xaa locations
  Clone ID: PAT_MRT3847_97166C.1.pep
PFRTQNPLSNFIMSGYPNQPPSYSYGAPPPPQPYGAHPPSQSYGAPPPSQSYGAPPPPQPYGAPPPAQPYSASPYAQPSAPYAAPYNKPPKNESHSHGGGSSGGYPAPAYASPFASLVPSAFPPGTDPNVVACFQMADQDGSGFIDDKEMQGALSSYNQSFSLRTVHLLMYHFTNSNVKKIGPKEFTSLFYSLQNWRSIFERFDKDRSGKIDSTELRDALLSLGYAVSPVVLDLLVSKFDKTGGKSKAIEYDNFIECCLTVKGLTDKFKEKDTXILALQPSPMNRLC

SEQ ID NO: 282553 - protein, 346 aa, Glycine max
  Clone ID: PAT_MRT3847_97167C.1.pep
MAPQTISILNLLPEPDVFIHTSHGTRIPAHAPILASMSPVLENLIDRPRKHRSSERIIQIHGVPCDAVTAFVRFLYSSRCTEEEIDQYGMHLLALSHVYMVQQLKQRCIKGLTHRLTTESVVDVLQLARLCDAPDLHLRCMKLLAKNFKAVEATEGWKFLVKHDPWLELDILRFIDEHETRKKKSRRYRMEQGIYAELSEAMECLEHICYEGCTHVGPYDAEVKRERTPCGRFATCQGLQVLIRHFATCEKKVRGGCVRCKRMWQLFRLHSYVCHDTDSSCKVPFCRQFQLRMQQEKRKDDAKWKLLARKVASAKVMSSLSLPKRKRDEETRVTMDNPGIRSFKLL

SEQ ID NO: 282554 - protein, 351 aa, Glycine max
  Clone ID: PAT_MRT3847_97168C.1.pep
MAPQTISIHYHTTRFLPQPDVFIRTSHGTRIPAHAGILASMSPVFDNFIDRPRKHRSSERIIQIHGVPCDAVTAFVGFLYSSRCTEEEMDKYGMHLLALSHVYMVPQLKQRCIKGLTHRLTTENVVDVLQLARLCDAPDLHLRCMKLLANNFKAVEATEGWKFLVKHDPWLELDILRFIDEHETRKKKSRKYRMEQGLYAELSEAMECLEHICYDGCTHVGPYDAAEVKRERTPCGRFATCQALQVLIRHFATCEKKVRGGCVRCKRMWQLFRLHSYVCHHTDSSCKVPFCRQFQLRMQQEKRKDDAKWKLLARKVASAKVMSSLSLPKRKRDEETRVNINNPGIRSFKLL

SEQ ID NO: 282555 - protein, 62 aa, Glycine max
  Clone ID: PAT_MRT3847_97169C.1.pep
ELVQIRHTNYVDVLLLMNMDVIIIPSEIDVGWPRKIMKSVTSLIFMCWETQDSYRLRKLTSD

SEQ ID NO: 282556 - protein, 75 aa, Glycine max
  Clone ID: PAT_MRT3847_9716C.1.pep
SLMQQLTSDTIIEVSIEIPFPFQAIPKQAIESAGTQVLEQILRIMLPRFVSQLEKDYRAWASGDTSRQPLETGEI

SEQ ID NO: 282557 - protein, 93 aa, Glycine max
  Clone ID: PAT_MRT3847_97170C.1.pep
MALNQSKAVLLRVSLVVVALFIAGYIVGPPLYWHFVEGLAAVNHSSSTCAPCICDCSSQPILSIPQGLSLLSLSLRSDFVSFSITHLMILLKN

SEQ ID NO: 282558 - protein, 58 aa, Glycine max
  Clone ID: PAT_MRT3847_97171C.1.pep
LSVIRQATNNSCAGSRSTNHQSEAGFPNRNVVLITLMRIHYALREALQCAILPQTVRC

SEQ ID NO: 282559 - protein, 42 aa, Glycine max
  Clone ID: PAT_MRT3847_97172C.1.pep
HEPLSTISPFLMMTIPEIKTSYIQDDSTFTQPLLPLSFGMYA

SEQ ID NO: 282560 - protein, 150 aa, Glycine max
  unsure (1)..(150): unsure at all Xaa locations
  Clone ID: PAT_MRT3847_97173C.1.pep
DAWADAWADAWVPNDCRSLXVAKVGNHKHIVGFHVAGSNGRLEYASLIPYVEPVVQAQSAEVYFDLLPEEVDRHEGVAHIGELKSDDYDPLSTKTNLVGTAKEWQLDLPCDIISSVLTTTDDRLVGTXHDGYDPFIEGIEKSATAMMPLD

SEQ ID NO: 282561 - protein, 38 aa, Glycine max
  Clone ID: PAT_MRT3847_97174C.1.pep
LLSVIYPISEDDHITGNSMSKLRYSCLVGMIFIFSMTA

SEQ ID NO: 282562 - protein, 49 aa, Glycine max
  Clone ID: PAT_MRT3847_97175C.1.pep
FPALTLLSIQSFMLALHFRLAFVCFHRANIGLLLFSLYSGRACRHVERW

SEQ ID NO: 282563 - protein, 65 aa, Glycine max
  unsure (1)..(65): unsure at all Xaa locations
  Clone ID: PAT_MRT3847_97176C.1.pep
MFXMIDSDSVFASLLEFFVYLLFLLWFGEPILSKFSLDSVFRSSMVVICCLLCYFGGGGGDTRAK

SEQ ID NO: 282564 - protein, 122 aa, Glycine max
  Clone ID: PAT_MRT3847_97177C.1.pep
DSKNAINWNETDAIAVELTAIFSQVSDSNVDEFTSTIEKLRYYLQIAKKVDRKQFTEGCIKELDGLLQDYKLLLEKLAKSNRLERFLSSYRLRTPLEQTNIRIDMLTNVAFSILPKPEKVGG

SEQ ID NO: 282565 - protein, 97 aa, Glycine max
  Clone ID: PAT_MRT3847_97178C.1.pep
SLAHLLQLVILFSQITINHLQFLTLLCASMASNHEMDQDDDGGATDLSTSDAETTTTNLNGVPKQHNAFEEETTGFQVLPLKKEEPTYSDPNMGITP

SEQ ID NO: 282566 - protein, 82 aa, Glycine max
  Clone ID: PAT_MRT3847_97179C.1.pep
EKLRQSLVNEGNETGGTFFNSEADNDDNEYDGGNPDFDMPDNAYMEEDLPSFSNEHEFDDAHVNPDEAVDLSQTSLEDLCRS

SEQ ID NO: 282567 - protein, 155 aa, Glycine max
  unsure (1)..(155): unsure at all Xaa locations
  Clone ID: PAT_MRT3847_9717C.1.pep
LDTPDNTPKLPWEFTWANQSMVXRFCQTDHTTISXSAPITSWELAEPPDGGWLAVSAIGAEANIAEVPAIRGYEGATSRSLYNRAQVGKXHQLVCGPTRCIMRGTPGVDDAELKRXRVEQLEASRYGGCSVGRMERIGCCVKAPMIAVADDVNGA

SEQ ID NO: 282568 - protein, 89 aa, Glycine max
  Clone ID: PAT_MRT3847_97180C.1.pep
KEEHFFLDLEVKKHIVGGYIQTEGSCFSGTPEKFAKDPPNPNWGGGGEKPPALETWKVWVFKLFFGGTFKKFPMMSGGMNSFGLSPLGG

SEQ ID NO: 282569 - protein, 130 aa, Glycine max
  unsure (1)..(130): unsure at all Xaa locations
  Clone ID: PAT_MRT3847_97181C.1.pep
KLVQFAEIQEKAGLNFSQYAFLTASSTHARAVATMKADGCPYLIAVVHYIALSTIPIDVVIDVIVCIXTNMRAYXLDPDITXTWLLGTMPKLIYTLTVWHHISXTVTRLNFDSSKQRLMPLNYRPTRLQN

SEQ ID NO: 282570 - protein, 144 aa, Glycine max
  unsure (1)..(144): unsure at all Xaa locations
  Clone ID: PAT_MRT3847_97182C.1.pep
GLSDLIACWIVYQAYTYLNHCNIIMYGFFNGVSAIQLLAVVGVAIQNSESLFYNSHYKTGSAFLPSIEYLSFFLYIASLYFAFHAYREFKAITLEMMGGAQGGGTELPQYRPPQRFXEQSGGGNQNQNQQRGFQQFTGKGVTIG

SEQ ID NO: 282571 - protein, 141 aa, Glycine max
  unsure (1)..(141): unsure at all Xaa locations
  Clone ID: PAT_MRT3847_97183C.1.pep
XVVFWXXEIGGGMDXXGFCXXXNXFFXEXXXRXXXLMNXXXKVFLVXRDXFVXXSXFFXXDXXVXXVCFIWYGXVLRGDVXRIIIGCGINIXENCVVDVGKCNLSGKVLGIMIGDNEIVGDRGGLXGWXGEDEGFIGMEEE

SEQ ID NO: 282572 - protein, 62 aa, Glycine max
  Clone ID: PAT_MRT3847_97184C.1.pep
RFIRNSGERHYSVSKQKHSSRFLFKNITLYNIFRYFEVPDFYTFLFNVVASPFLIISSPLPY

SEQ ID NO: 282573 - protein, 72 aa, Glycine max
  unsure (1)..(72): unsure at all Xaa locations
  Clone ID: PAT_MRT3847_97185C.1.pep
SSESFEGSVNAFHVKRADTVGPGHSSVGAKXSNIVDGQSILEXEPRVIKVFKPSKACAAIRTTHNGAIPALQ

SEQ ID NO: 282574 - protein, 93 aa, Glycine max
  Clone ID: PAT_MRT3847_97186C.1.pep
MASFGVIHSLALILWKALFCSITTSRAEVHHLYVDANLIVPALTTWLSIRWSRSFMGSINANLRTNENTMAVPMIGNNIPVYALWTIYICEKI

SEQ ID NO: 282575 - protein, 103 aa, Glycine max
  unsure (1)..(103): unsure at all Xaa locations
  Clone ID: PAT_MRT3847_97187C.1.pep
ISGDFFSIVSEPXXSCXLXFHIHXGPLKFMGXHPXNWWKCFYRYLTEFLLSQXQPLXLLLLLFSMGFLSNSTYLIHFPKVASPSLFSPTYIVRSLQFKQTCIY

SEQ ID NO: 282576 - protein, 390 aa, Glycine max
  unsure (1)..(390): unsure at all Xaa locations
  Clone ID: PAT_MRT3847_97188C.1.pep
MGSISNTEVHNHHNDDDDDDHRHRVNFSIQRGFGTKLKEALKETLFPDDPFRQFKNEEKPMGRVMKGVQYFIPIFEWLPTYNFRLFCSDLIAGLTISSLAIPQGISYAKLADLPPLIGLYSSFVPPLIYAVFGSSRHMAVGTIAAASLLIAQTIQTVVDPVEDPTLYLHLIFTTTFITGVFQACLGFFRLGILVDFFSHSTINGFMGGTAVILILQQLKGVFGMKHFSTKTNLVAVVKSIVNNRQEIRWEPTILGVIFVAFLQFTRHLRNKNPKLFWVPAIAPMVTVVVAAVFTYVPKGQHHGIQIADHLYKGLNPLSIHYSNFNGKYIRTHVQAGLDTSVXPLAKRIPIGRSFAVADNTPHDGNKEMIAFRLMNXFGSSTSCYLTRGPF

SEQ ID NO: 282577 - protein, 104 aa, Glycine max
  Clone ID: PAT_MRT3847_97189C.1.pep
RSYNASLVNDGCGDWMRYYVVVVGFGIAIFFRFEKRGWFAVSKSEKGRVVMAVSPPLAWKGVVVVAISSLSLSSPVWWLARKEDLLRCCRGCCHCSWFPLMLSL

SEQ ID NO: 282578 - protein, 74 aa, Glycine max
  Clone ID: PAT_MRT3847_9718C.1.pep
LTLYKRKCVCVCICCPCKMDPKTDGGVIDGRTGRRNQAYLNITLLFWRNCNQLVRVPLVELCYVQECGSSLGRV

SEQ ID NO: 282579 - protein, 51 aa, Glycine max
  Clone ID: PAT_MRT3847_97190C.1.pep
CWASVSDCLTVEVGGHCNSFMWSSSSMLKLAISYCDFLATAAMNLRSIKAC

SEQ ID NO: 282580 - protein, 139 aa, Glycine max
  unsure (1)..(139): unsure at all Xaa locations
  Clone ID: PAT_MRT3847_97191C.1.pep
ISSTLHELPPPSSPSSTTSAAMPTPSASSDPILDRLASSDCAVKFKAIREVKNHIIGNRTKKHSYIKLGAVPAVAAALADSDPNLIVQSAAALGSXPCGVDDGVRAVLDAGAFPRLIGLLSAHDEKVNSNVQLFATVFL

SEQ ID NO: 282581 - protein, 47 aa, Glycine max
  Clone ID: PAT_MRT3847_97192C.1.pep
LNSHFSGKNKYCQADSVLKKNSGSPAFILTLFLQYRILHPGTDATAL

SEQ ID NO: 282582 - protein, 51 aa, Glycine max
  Clone ID: PAT_MRT3847_97193C.1.pep
ISVSRCIDSVSLSVSITRELSVDHSVTVFHLIMLLRPNAPVLGFPKNQTQS

SEQ ID NO: 282583 - protein, 78 aa, Glycine max
  Clone ID: PAT_MRT3847_97194C.1.pep
SYQRRGVSPNHQAVMKVHTRNSKCNKCDNNSGVLHSFGHEAIHCSACLRIVDYAHRIPCIMNRRPSCLDSRTQPRYPP

SEQ ID NO: 282584 - protein, 48 aa, Glycine max
  Clone ID: PAT_MRT3847_97195C.1.pep
YRKQVIAIHICTFVQLYILEMWNCSWCRNSDVMSFGFRIELIFLCPIS

SEQ ID NO: 282585 - protein, 85 aa, Glycine max
  Clone ID: PAT_MRT3847_97196C.1.pep
LLEMAKLSFAQIFMVTLIILVISKTSEADRCQKVIQPSNCNLGKCQADCSFQYRDYRGIGKCIGGSNATFQCVCFYDCGAPSSLV

SEQ ID NO: 282586 - protein, 76 aa, Glycine max
  Clone ID: PAT_MRT3847_97197C.1.pep
MGLCFGCFGVDKRMSKEEERLASEEARAKAAEAAQKRQEQFENSAAGRAARAQQQAMAKQSANTNKGEPVLKWQMS

SEQ ID NO: 282587 - protein, 147 aa, Glycine max
  Clone ID: PAT_MRT3847_97198C.1.pep
WQRRVGGRVGGRVGGRVGVTKGMGGLFSYSSLPEEESPDVKAFHSAESWQSHLKEIKESPKLVVIYFTASWCGPCKFITPVFNQIAAEFANADFVKIDVDELSGVAKEFKVEAMPTFVLWKEGKEVERVVGAKKVELEKKIKQLSQS

SEQ ID NO: 282588 - protein, 104 aa, Glycine max
  Clone ID: PAT_MRT3847_97199C.1.pep
MGGLFSYSSLPEEESPDVKAFHSAESWQSHLKEIKESPKLINKNQVVIYFTASWCGPCKFITPVFNQIAAEFANADFVKIDVDELSVIFSSIFSLFFIQSNYFC

SEQ ID NO: 282589 - protein, 66 aa, Glycine max
  Clone ID: PAT_MRT3847_9719C.1.pep
HFIQGRLDVLTQKGPHPTTLCFEIGCEALALQRFAHWTHSFFKKFHRQEQSWPEECYGGILGVHSY

SEQ ID NO: 282590 - protein, 77 aa, Glycine max
  unsure (1)..(77): unsure at all Xaa locations
  Clone ID: PAT_MRT3847_971C.1.pep
STPARKRLMRDFKRLQQDPPAGINGAPHNNNIMLWNAVVFGPEDTPWXEDAFTSTRPLPDDDANKTRNTRGRGCIYH

SEQ ID NO: 282591 - protein, 97 aa, Glycine max
  Clone ID: PAT_MRT3847_97200C.1.pep
RRCRRLWLGRKERKLRGLWEPIRWSSRKRLSNFLNRESMYDSNLLAIQTNLCMYVCMNLCFQGKIKIRTRVYAYKACDDDDVVKFKLISCMYVSSPR

SEQ ID NO: 282592 - protein, 236 aa, Glycine max
  Clone ID: PAT_MRT3847_97201C.1.pep
TRNNLQNITSYAKQNFDLLQIYTLLSLSLLFSNSTSMGTEVLRPTRLFHPTPSVFHRLAISRRRTYGTPATRPEHRKRVVEKRPSSMIRGFRGWRWRRSRILRRGESLDSKLKTGALKKEGDNLVVVGTQRLGPDPDMVQKQIRIVDFRAGRQVYAGSAFSVSPSPTALPLTSFPGARFARDPRSRCRRRRARCPCRLFRRGSRRWRLPTLRPVILGVFSGLNEPNRCRFRISGRV

SEQ ID NO: 282593 - protein, 172 aa, Glycine max
  Clone ID: PAT_MRT3847_97202C.1.pep
MGTEVLRPQDCFTHRIAVPPAGFSRRRTSGTHNNNYFRGTRKPVTRPEQRKRVVEKRPSFDDSRFSRLEMEKVTILRRGESLDSKLKTGALKKEGDNLVVVGTQRLGPDPDMVQKQIRIVDFRSGRQVYAGSAFSVSPSPTALPLPSFSKKQPAVAVADSATRDLRRLLRLE

SEQ ID NO: 282594 - protein, 89 aa, Glycine max
  Clone ID: PAT_MRT3847_97203C.1.pep
DISPLITNASLDIRIKNKIWLKAQCHKGYFQFNSFGLFIIQRTLFFFIFLPFLCAQVPRGFTVLLRVRHRSICPPSSWGAPPSVVFSQP

SEQ ID NO: 282595 - protein, 43 aa, Glycine max
  Clone ID: PAT_MRT3847_97204C.1.pep
VLFFYSRDSDRDFVSVEFIIARHIHLCDIHSNAWCHACCPRSL

SEQ ID NO: 282596 - protein, 150 aa, Glycine max
  Clone ID: PAT_MRT3847_97205C.1.pep
MGTEVLRPQDCFTQRIGVPPPGFSRRRTYGTHHNNKNNNVNNYFRGNRKPTTRPEQRKRVVDKRPSLDDSRFSSLEMEKVTILRRGESLDSKLKTEALKKEGDNLIYAGSAFAVSPSPSALPLPSFSKRQPAVAVADSATRDLRRLLRLE

SEQ ID NO: 282597 - protein, 157 aa, Glycine max
  unsure (1)..(157): unsure at all Xaa locations
  Clone ID: PAT_MRT3847_97206C.1.pep
NSAPAAESSALEKSYELPDGNVITVGNERFRCPEVLFQPNFIGMEAAGVHETTFNSIGKCDIDIRKDLYGNVVLSGGTTMFEGIAERMTKELTNLAPASMKIKVVAPPERKYSVWXIGGSILASLSTFQQMWISKDEYEESGPGIVHRKCSSTLINA

SEQ ID NO: 282598 - protein, 37 aa, Glycine max
  Clone ID: PAT_MRT3847_97207C.1.pep
MVPLGSLTLINRFHPYKAIFPSLGPLMRHGIILVLPK

SEQ ID NO: 282599 - protein, 219 aa, Glycine max
  Clone ID: PAT_MRT3847_97208C.1.pep
VTVAKWILKNRAESENMNWILANSKPCPKCKRPIEKNHGCMHMTCTPPCKFEFCWLCVGAWSDHGERTGGFYACNRYEAAKQEGVYDDTERRREMAKNSLERYTHYYERWASNQSSRQKALADLQQMQTVHIEKLSDIQCQPESQLKFITEAWLQGSRIIRQHRPKNGTYAIVNMSFLAWEWALHKHQLEGVIAGLRLGRPVVVAFGIVGLRAVCPPQM

SEQ ID NO: 282600 - protein, 39 aa, Glycine max
  Clone ID: PAT_MRT3847_97209C.1.pep
HSENSKNVTRKYHHNLNHFDQHNLEEQKYLLARFVLRAN

SEQ ID NO: 282601 - protein, 123 aa, Glycine max
  unsure (1)..(123): unsure at all Xaa locations
  Clone ID: PAT_MRT3847_9720C.1.pep
QMSFEXAXXSXPXLFLPXXGXHPXXSXXXPXXWLXAESLLRLXPIKKXFFKXNFHXGGSPLLSXVGFYXXPXPQXXXSGRGSIPXXPXPXXXXXRXXGXFLVSLIXXSXAXLFLXINCSPPFL

SEQ ID NO: 282602 - protein, 205 aa, Glycine max
  unsure (1)..(205): unsure at all Xaa locations
  Clone ID: PAT_MRT3847_97210C.1.pep
TRPVAIQLPIFSPPVCPNPTRDRCSTELRFSRWNNANAEKFNRRRRTIQEIEDEICRTRRFTAADNITNTAFAADSAAAAETFKSLGTPSAPSQPSIPGKKSKYSKPPPKPKPLLDSHPVVSRAASLEFRPGPENVRIGDDGVSYVVDGAPFEFRFSYTETPNAKPVKLREPPFAPFGPASLPRPWTGRXPVPPSKTTVKDXHAL

SEQ ID NO: 282603 - protein, 75 aa, Glycine max
  Clone ID: PAT_MRT3847_97211C.1.pep
IDSRHGNAYDLVRVPYYLYIYRFLEQQVALMVSGMGTASIDVFRMASYIWEKRQSNVLGRTLIFNAFILWVICEA

SEQ ID NO: 282604 - protein, 63 aa, Glycine max
  Clone ID: PAT_MRT3847_97212C.1.pep
RLYSLSRKELLRCYPMACSRVYKRICGDNFFFQIPLQFSNICSCITCQHTLLRFFCVFIQPFS

SEQ ID NO: 282605 - protein, 78 aa, Glycine max
  Clone ID: PAT_MRT3847_97213C.1.pep
FNELNCIYTITCFINGNVLLFDTNPVLSFILARLPFLTSWLVVAYHLQIFMPHTEPSEQGSLILMHSQGYNNWTHKSS

SEQ ID NO: 282606 - protein, 121 aa, Glycine max
  Clone ID: PAT_MRT3847_97214C.1.pep
MCKRKSPGSELRPPSRPTSPELSSSTSSGEWPEFSSSSPSASSASYTSKMPKEGICVYFPEAEEENVQRANAAPETKAMDLVGCPRCFMYVMLSEADPKCPKCKSTVFLEFFKAENFKTDN

SEQ ID NO: 282607 - protein, 90 aa, Glycine max
  unsure (1)..(90): unsure at all Xaa locations
  Clone ID: PAT_MRT3847_97215C.1.pep
SFIVEXXHXLXFEXIXLCQSCLRRISQHGDRSYRRQLLKVANAAIHPKSKGMLTKGXXNNQPXHFRFSLPXRFXXFSXSPXXSLXVXXIS

SEQ ID NO: 282608 - protein, 58 aa, Glycine max
  Clone ID: PAT_MRT3847_97216C.1.pep
EDFQAYRDSCFSIHQRHDPRAVFHLVDHSPRHREKRGLVFQVIRLVAPVLARVRITDA

SEQ ID NO: 282609 - protein, 44 aa, Glycine max
  Clone ID: PAT_MRT3847_97217C.1.pep
VSDVIERCLNIPLYPQSQKCLVLTETVFRFLSVVVAFLHREKRY

SEQ ID NO: 282610 - protein, 83 aa, Glycine max
  Clone ID: PAT_MRT3847_97218C.1.pep
LQEARVEYNVCGSCCYMLVKRLHRWRGLCNQVFIIPYKKSFYLPLQDNPLSVPHKRRGEDGLSCIRYRAAHPLQRSPPINSTV

SEQ ID NO: 282611 - protein, 91 aa, Glycine max
  Clone ID: PAT_MRT3847_97219C.1.pep
IFIQLEDMNMDEESEKVAVELAAQGVIGKRVDEMESDFMMALDYMIQLAENDQDDKRKSLLEVIKETVLSHLTKKCPPHVQVIGLLCRTPK

SEQ ID NO: 282612 - protein, 92 aa, Glycine max
  Clone ID: PAT_MRT3847_9721C.1.pep
RIGSRCADPHLCLMAKVTSFLLLMIGLNSIHGPTTLVGLFLFLMLYTYLCTAHSRVGSFRMVTTSYNWAHTITHTHTCNSFKVQRYHLFSYP

SEQ ID NO: 282613 - protein, 119 aa, Glycine max
  unsure (1)..(119): unsure at all Xaa locations
  Clone ID: PAT_MRT3847_97220C.1.pep
AKRIASGNFGSCPIFLFFSVNASGXFCRVAEMMGPDHFNKDMDFWQHDKWSGSLPVKWHIIKYVPNADYRHIILENNANKPVTNRIDTHQMVNMYYXLEMLKTFKNHDVKTFLLDDFMY

SEQ ID NO: 282614 - protein, 55 aa, Glycine max
  Clone ID: PAT_MRT3847_97221C.1.pep
KKQTAWNFFQSKFNQPGCRHHSPHPQEGAGVPFIAKSFSYFKHSYNPRLHKRDYF

SEQ ID NO: 282615 - protein, 98 aa, Glycine max
  Clone ID: PAT_MRT3847_97222C.1.pep
LFIYKPFIYPTVPGIFFSSFPFLSLSTSQISIPPTPKYPPTTTSFNKTNISPTTHTLSLTPNKTLTGSIHTAIATKNTSKASANPKLPFPPFFMDMTK

SEQ ID NO: 282616 - protein, 43 aa, Glycine max
  Clone ID: PAT_MRT3847_97223C.1.pep
YHWTNPIKWLPYSISIIEFLSLSQSFLKFQLDKIFAKFFIFFY

SEQ ID NO: 282617 - protein, 61 aa, Glycine max
  unsure (1)..(61): unsure at all Xaa locations
  Clone ID: PAT_MRT3847_97224C.1.pep
NAAVSLAISISLTVKSHTTIKNALILSVIVDNVPLMTIKMRPTYCKIIRWIKLINGXKLYQ

SEQ ID NO: 282618 - protein, 30 aa, Glycine max
  Clone ID: PAT_MRT3847_97225C.1.pep
SGWFDNQAGYNQNTINYKQSMWWLLIILCV

SEQ ID NO: 282619 - protein, 75 aa, Glycine max
  Clone ID: PAT_MRT3847_97226C.1.pep
SLCHRELWSWQQVIIQVCRHNLFPLGDGLFFLQPKTLFFRLHFFWNLSLYTLNHVMIHTEICALYCNVYFMNHNE

SEQ ID NO: 282620 - protein, 43 aa, Glycine max
  Clone ID: PAT_MRT3847_97227C.1.pep
LSGCFFYFFTCLSSFFFCSFSSGGEDGYVRLHHFDPDYFNIKI

SEQ ID NO: 282621 - protein, 326 aa, Glycine max
  Clone ID: PAT_MRT3847_97228C.1.pep
MRPILMKGHERPLTFLKYNRDGDLLFSCAKDHNPTVWFADNGERLGTYRGHNGAVWTCDVSRDSVRLITGSADQTAKLWDVQSGLQLYTFNFDSPARSVDFSVGDRLAVITTDPFMELSSAIHVKRIADDPTEQSGESLLLIKGPLGRINRAIWGPLNSTIISAGEDAVIRIWDSETGKLLKESDKESGHKKTVTSLAKSADDSHFLTGSLDKSARLWDTRSLTLIKTYVTERPVNAVTMSPLLDHVVIGGGQDASAVTTTDHRAGKFEAKFFDKILQEEIGGVKGHFGPINALAFNPDGKSFSSGGEDGYVRLHHFDPDYFNIKI

SEQ ID NO: 282622 - protein, 326 aa, Glycine max
  Clone ID: PAT_MRT3847_97229C.1.pep
MRPILMKGHERPLTFLKYNRDGDLLFSCAKDHNPTVWFADNGERLGTYRGHNGAVWTCDVSRDSARLITGSADQTAKLWDVQSGLQLYTFNFDSPARSVDFSVGDKLAVITTDPFMELPSAIHVKRIANDPSQQIGESVLLIKGPQGRINRAIWGPLNTTIISAGEDAVIRIWDSETGKLLQESDKESGHKKTVTSLAKSADDSHFLTGSLDKSARLWDTRSLTLIKTYVTERPVNAVTMSPLLDHVVIGGGQDASAVTTTDHRAGKFEAKFFDKILQEEIGGVKGHFGPINALAFNPDGKSFSSGGEDGYVRLHHFDPDYFNIKI

SEQ ID NO: 282623 - protein, 101 aa, Glycine max
  Clone ID: PAT_MRT3847_9722C.1.pep
PQSLIFFFKWKKGSDRPVWKSRGGTPNNNFLGGFQKKYPYHQTLGFPFIYIYIYIYVCIYIWGGSPFSPIFLSFHQNPTKRPIRHFYWGKKGMEPPFGRLF

SEQ ID NO: 282624 - protein, 152 aa, Glycine max
  unsure (1)..(152): unsure at all Xaa locations
  Clone ID: PAT_MRT3847_97230C.1.pep
GAAWRVSPELYGDSRPRLFTYWTSDSYQATGCYNLXCFGDGTLVGYWPEELFTHLATHATMVEWGGEVVNTRANGQHTSTQMGSGHFADDGFGKASYFRNLEIVDTDNSLSSVHNILTLAENTNCYDIKSSYSNEWGTYFYYGGPGNNPQCP

SEQ ID NO: 282625 - protein, 192 aa, Glycine max
  unsure (1)..(192): unsure at all Xaa locations
  Clone ID: PAT_MRT3847_97231C.1.pep
VSPELYGDSRPRLFTYWTSDSYQATGCYNLLCAGFVQTNGRIAIGAAISPISSYESNQYDITILIWKDPKVGNWWMSFGDGTLVGYWPEGLFTHLATHATMVEWGGEXVNTRANGQHTSTQMGSGHFANDGFGKSSYFRNLEIVDTDNSLSSVHNILTLAENTNCYDIKSSYSNEWGTYFYNGGPGNNPLCP

SEQ ID NO: 282626 - protein, 79 aa, Glycine max
  unsure (1)..(79): unsure at all Xaa locations
  Clone ID: PAT_MRT3847_97232C.1.pep
REYSSLTFLFRHNKNRIPVSNXRKPLLLYANLAKRYILHPVVVTLSHLRVPIDSVRTVAGFLXNTRLAVEKKIRTLTVY

SEQ ID NO: 282627 - protein, 38 aa, Glycine max
  Clone ID: PAT_MRT3847_97233C.1.pep
TMQILTGLIERYEFHHKLRSTAEALVAAAQLSYQYIRD

SEQ ID NO: 282628 - protein, 85 aa, Glycine max
  Clone ID: PAT_MRT3847_97234C.1.pep
RELKLDRPSGPPKPEEIGDLSSLSSKQSGAVNQNARPQTKPILSPNQPKKDEKDFNYAKQAVILGGSMESSNRLVQPLKRILPKP

SEQ ID NO: 282629 - protein, 414 aa, Glycine max
  unsure (1)..(414): unsure at all Xaa locations
  Clone ID: PAT_MRT3847_97235C.1.pep
KLKWIASLNEYAYYAQVAGLYYSISHTDGGFEVTLRGYNHKLRILLETIVEKIATFEVKTDRFSVIKEMVTKEYQNFKYQQPYQQAMYYCSLILQDQTWPWIEQLDVLPALQVEDLAKFVPAMLSRTFLEFYIAGNIESHEAPSMVKHIEDVLFNCSKPLCKPLFSSQHLANRVVKLESGMNYFYPSEXCLNPEDENSALVHYIQVGRDDFKLNVKLQLFALVAKQPTFHQLRSVEQLGYITVLMQRNDCGIRGLQFIIQSTVKSPGNIEQRVEAFLQMFETKLHEMTIDEFKSNVNALIDVKLEKHKNLREESSFFWREINDGTLRFDRTDYEVEALRQLTLQELIDFFNEYVKVGAPRKKTLSVRVHGNRHSSEYKTEASEPHLAKIDNIFTFRRSQALYGSFKGLSGQMKL

SEQ ID NO: 282630 - protein, 72 aa, Glycine max
  Clone ID: PAT_MRT3847_97236C.1.pep
KLIPSNVNMEMQYSMIIMSFDKIFQDTVYSLESSYRPRLKSFLFPWECGKLCSNPTVTPIPTLIFYFNYLKF

SEQ ID NO: 282631 - protein, 72 aa, Glycine max
  Clone ID: PAT_MRT3847_97237C.1.pep
QKGKAELLSDSITMLLARSPRCLSHICHWVVVFAAVAGPVVGLYQGSWSQVELLAGEHLTLLYWRYHNASCP

SEQ ID NO: 282632 - protein, 124 aa, Glycine max
  unsure (1)..(124): unsure at all Xaa locations
  Clone ID: PAT_MRT3847_97238C.1.pep
EFKSNVNALIDVKLEKHKKLWEESSFFWQEINYGTLRFDRKDYEIEALRQLTLQELIDFFNEYVKVGAPRKKTLSVRVHGNXHSFEYKAEVSEPHLAKIDNICTFRRSQSLYGSFKGLFGQMKL

SEQ ID NO: 282633 - protein, 63 aa, Glycine max
  unsure (1)..(63): unsure at all Xaa locations
  Clone ID: PAT_MRT3847_97239C.1.pep
TYYIASYYKTTYQKSIELFLTLYSQMTLLPAYKIFNQFNTSSHICXYDIIYNVSSFSDPFSQA

SEQ ID NO: 282634 - protein, 106 aa, Glycine max
  Clone ID: PAT_MRT3847_9723C.1.pep
HDYLRTINVWRKPNNCAICYPTFSDFGEHPLHTTIWDWVLCILGLWFLTNITTVDGLVSLSWTAGSMHSLALSYFGSLIQLGKNVALRRTLICMRLLLTSVYPLYS

SEQ ID NO: 282635 - protein, 81 aa, Glycine max
  Clone ID: PAT_MRT3847_97240C.1.pep
GVESFSGVILLHSYLIASSIRLFKFIPRDFVLLMLCTRLLKIIDIKLLLQWGGQCSFLYQVLCLNVLPPTEVAALCFLIKS

SEQ ID NO: 282636 - protein, 67 aa, Glycine max
  Clone ID: PAT_MRT3847_97241C.1.pep
SNIFFIGAPKFNSRAGVKQRGDGKNPGVTQLNGLEENPLFARWGKNKKAPTDRLSKKLGTLNGKGNP

SEQ ID NO: 282637 - protein, 181 aa, Glycine max
  Clone ID: PAT_MRT3847_97242C.1.pep
RLELVSSKNAIPGYLTDASSHQQSPSVGEDDGGVTMSDEMDLLVEQVKMLAGDIAFSTSTLKRLIEQSVNDPESSKIQIENLEQDIQEKKKQMMVLEQRISESGESSVANSSLVEMQQAIARLVTQCDEKAFELEIKSADNRVLQEQLDNKCSENRELQEKVKLLEQQLATITGWYLVNVY

SEQ ID NO: 282638 - protein, 240 aa, Glycine max
  Clone ID: PAT_MRT3847_97243C.1.pep
VEIYASRNKIIDEKSLIKKYQREISVLKHDPRVRPQGMQRGVNHEEIMTLKQKLEEGQVKMQSRLEEEEEAKVALMSRIQKLTKLILVSSKNAIPGYLTDASSHQQSPSVGEDDKYDALRDGSLLVENESQKDVSTVSSDPSHDVRHIISSSRRNEELSPTSCIITESTRLLPAGGVTMSDEMDLLVEQVKMLAGDIAFSTSTLKRLIEQSVNDPESSKIQIENLEQDIPEKRSNDVLEQ

SEQ ID NO: 282639 - protein, 69 aa, Glycine max
  unsure (1)..(69): unsure at all Xaa locations
  Clone ID: PAT_MRT3847_97244C.1.pep
MPITNISFIKPQXSTHPYTFITSFSHFISTFIFLFSSSYSFISYNNLTHNFSFTPSFLISSSISHSFSL

SEQ ID NO: 282640 - protein, 239 aa, Glycine max
  unsure (1)..(239): unsure at all Xaa locations
  Clone ID: PAT_MRT3847_97245C.1.pep
LIQVNIAAPGADQSVYFPYTDKVKRLTQFFPAIEDLLYSKVDTNEHIGYLENRRKPIIFSMARFDVFINLTGLVEWYGNNQRLRKMVNLVIVGGFFDPLKSKDREEMTEIRKMHDLVAKYQLKGQFRWIAAQTDRYRNGELYRFIADTKGAFVQPALYEAFGLTVIEAMNCGLPTFATNQGGPAEIIGDGISGFHIDPHNGEEIKHXIADFFXKCLQDSAHWKXISAAGXGTHNECYTW

SEQ ID NO: 282641 - protein, 126 aa, Glycine max
  Clone ID: PAT_MRT3847_97246C.1.pep
SSRNYDPLQPPVSGLDSACCIGADQPSPVSVLEPSFTDDLSPCLDYFESLNVDIQGLRMQLQLLKLESEDFVEEPVLIQSDEDGMEASTGISEDSGLLQTRDSWESSYTIDVLYESGIDRAQPDAF

SEQ ID NO: 282642 - protein, 102 aa, Glycine max
  unsure (1)..(102): unsure at all Xaa locations
  Clone ID: PAT_MRT3847_97247C.1.pep
MFTAPALFQYGDSTVDTDRNNIYXENNRSEHLPTIRXDSKVGKPTDHLINGKDPSDFLAPEYCIKDNAPPYLYPHVPPDEXATGECFAYCGAGYDPFTSNSL

SEQ ID NO: 282643 - protein, 40 aa, Glycine max
  Clone ID: PAT_MRT3847_97248C.1.pep
NQTHFHYHFVFEGNYDIRKQSTQTSLINPIPSLTLIETFI

SEQ ID NO: 282644 - protein, 48 aa, Glycine max
  unsure (1)..(48): unsure at all Xaa locations
  Clone ID: PAT_MRT3847_97249C.1.pep
GKAWLXPGRXVVRECNSRVRRXSLXAAACXLGXXQGSGIPSLRTRACX

SEQ ID NO: 282645 - protein, 42 aa, Glycine max
  Clone ID: PAT_MRT3847_9724C.1.pep
NTSPLVSVQALILHPMHFKMELSLIPVTIAPRGQVQCPLEVI

SEQ ID NO: 282646 - protein, 48 aa, Glycine max
  Clone ID: PAT_MRT3847_97250C.1.pep
IKCNLKHPLAAKGMDLNPIAAWEIRNISNFSYHSNQKQDLLKTNSNEN

SEQ ID NO: 282647 - protein, 46 aa, Glycine max
  Clone ID: PAT_MRT3847_97251C.1.pep
DLRIRESVAVLLPLRLQGLCSMCGSSVSNCPICDFDTNARVLVNLS

SEQ ID NO: 282648 - protein, 137 aa, Glycine max
  unsure (1)..(137): unsure at all Xaa locations
  Clone ID: PAT_MRT3847_97252C.1.pep
GELRKLAGVIGVCKQYKXHMIGAVGMTGRGVGELSRVGTENVVSMMGTLTKFLGSCGGYIAESKDHIQHYEVHVALMSSXATLISPPGGQQMVASIRVILGEDGCNRGGPKLAQIRENCYVLRSKLLNKGIXVVGDN

SEQ ID NO: 282649 - protein, 93 aa, Glycine max
  Clone ID: PAT_MRT3847_97253C.1.pep
TGNTTDEPARKRFSMYGDDDDDDDDDDASFGRKELLPLELLCLLPNQAEQVEELNKTSRTKIPNFPDFIFEFVQPCNGDERRTIMCRVQGTSS

SEQ ID NO: 282650 - protein, 35 aa, Glycine max
  unsure (1)..(35): unsure at all Xaa locations
  Clone ID: PAT_MRT3847_97254C.1.pep
RRTQYLSSEIVPSRVYXSPILKXCSMEREKMEVNR

SEQ ID NO: 282651 - protein, 91 aa, Glycine max
  unsure (1)..(91): unsure at all Xaa locations
  Clone ID: PAT_MRT3847_97255C.1.pep
ILLDKIILNPPVFEYFASDRSSEGGVLMKPADLMRAVVPXFPPSESHLVRDGYLEGERRPGHLRCPPSKFFMLFDVNNDGLISFKELSPLS

SEQ ID NO: 282652 - protein, 80 aa, Glycine max
  unsure (1)..(80): unsure at all Xaa locations
  Clone ID: PAT_MRT3847_97256C.1.pep
LTKKKKKKKESGRSTGSNLTNSSILRHNSSIISPNFNTLVAVLQHRHYXNNAVTKLINLVAHHPFFSCCNSNEDATNHPS

SEQ ID NO: 282653 - protein, 225 aa, Glycine max
  unsure (1)..(225): unsure at all Xaa locations
  Clone ID: PAT_MRT3847_97257C.1.pep
PPPPPPXPXXPPXPXXPPPGXXXXXXPPPPPXXPXPVPPPXXXPXPPPRXPPPXPPXPPPPPPPPPPPPXPPPPXXXXXAXXVPPXPXGXAPXXXPPPPRXXPXXPPPPGPPPFPPPXPGRXPPPXXXPXAPPXGPPGFPPXPSGSFPVRPCXRXPLSPRPPXXPXXPPAPPXPPLXGPXAXAXGPPFFFFFFSPPPFFFFFFFFAAASPLLSVCFSSLVPVAAR

SEQ ID NO: 282654 - protein, 36 aa, Glycine max
  Clone ID: PAT_MRT3847_97258C.1.pep
YISISVTLPFSTCRDHSIHQIDNLIQHNYTPNPNVA

SEQ ID NO: 282655 - protein, 229 aa, Glycine max
  unsure (1)..(229): unsure at all Xaa locations
  Clone ID: PAT_MRT3847_97259C.1.pep
MGKIALAVIVSLWVIPTTVMVNRIVPEPYMDEIFHIPQAQQYCKGKFGSWDPMITTPPGLYYLSLAHVASLFPGFYCVEAASISDLCSAAILRSINGVLAVVCSLILYDIVTHLKPTLNDRKAMLHAVVLSLYPLHWFFTFLYYTDVASVTAVLAMYLASLKKNYWFSALIGAFAVVIRQTNIIWVLFVACTXIINISVAHAKHSTTDEPDVSIKHGLAYATGTNGFNL

SEQ ID NO: 282656 - protein, 175 aa, Glycine max
  Clone ID: PAT_MRT3847_9725C.1.pep
GPPGPRAAKKAPSRGRKTGPPFPVGGIPRVPKAGKNPQGVGAGAPLFLPPVFENIPPEGLGMGGNPSRENQKTPIFSPPPPMAGGDPQKFCQLFGEGSPANGGGLPNHPPLFFSQKGGGSSQGGGAGQGFLKGGPRSPRFLNLILWLPSFFFSPLIGGKKNGPLVGGGRVSGPRG

SEQ ID NO: 282657 - protein, 42 aa, Glycine max
  Clone ID: PAT_MRT3847_97260C.1.pep
MGKIALAVIVSLWVIPTTVMVNRIVPEPYMDEIFHIPQAQQY

SEQ ID NO: 282658 - protein, 106 aa, Glycine max
  Clone ID: PAT_MRT3847_97261C.1.pep
PLRSIRKVILGLIKPQRLVKGLREGIFSSPLYINGLVRLKILIEYRIIYYISLNRWLCYMLDIDTLQALYRCVRLILFEDSLRLVEMGFGWMPYTVDFYAFCLSDL

SEQ ID NO: 282659 - protein, 52 aa, Glycine max
  Clone ID: PAT_MRT3847_97262C.1.pep
ISIPILTRARKQFLHLTNFQFRTQKIFNLLSIERGNNIVGTIYLPKTKFQNL

SEQ ID NO: 282660 - protein, 48 aa, Glycine max
  Clone ID: PAT_MRT3847_97263C.1.pep
SSRVPCNVFNAISSDWPALIKDVGTGAVSHLLLIYGRVHPDKGCRVVG

SEQ ID NO: 282661 - protein, 75 aa, Glycine max
  Clone ID: PAT_MRT3847_97264C.1.pep
SSQNTYHRKSFTSTFFLKKNIHMNINNTPKYLLNERFHPLDIFHHHSSVYIRFYNWLSLEIFTSAAMKKSKNKSY

SEQ ID NO: 282662 - protein, 65 aa, Glycine max
  Clone ID: PAT_MRT3847_97265C.1.pep
HWEWKTRRLKRKSDRKEEGETPSCRGLWQGKPAAMGFPRQNLLVVISHEAPPRPCCSVRVSSRAE

SEQ ID NO: 282663 - protein, 107 aa, Glycine max
  Clone ID: PAT_MRT3847_97266C.1.pep
MASFRAFWNSPVGPKTTHFWGPIANWGFVAAGLADLNKPPEMISGNMTGAMCVYSALFMRFAWMVQPRNYLLFACHASNETVQLYHFSRWAKAQGLLSEKKEEASSQ

SEQ ID NO: 282664 - protein, 169 aa, Glycine max
  unsure (1)..(169): unsure at all Xaa locations
  Clone ID: PAT_MRT3847_97267C.1.pep
MDTLFFGIKLRAPLEVNNTIKRVFPRSKRCNVSAKHVRYPSRHAFRFCSQNVNLLRKPHVSASGSRLKCFKEKEPPFSLSVSYFTSLWKEGVLLMRASVFTVVISGLCLLVXWFGRNKAXVXVETNILPSVCSVISEYVQRDVCFGRVVRISPLSVTLESWXFGPGEEE

SEQ ID NO: 282665 - protein, 37 aa, Glycine max
  Clone ID: PAT_MRT3847_97268C.1.pep
VNRKSCFVHSFGKSQYTRHMIPQCQDSDLLIPHQAFN

SEQ ID NO: 282666 - protein, 134 aa, Glycine max
  unsure (1)..(134): unsure at all Xaa locations
  Clone ID: PAT_MRT3847_97269C.1.pep
FLTXERRENQGRGGPHQNEAHPHESNNQTNDKSRTRAGEAPPNSKNHCPSQRLTARETMKPKAGKYTAPTKKRSTDHNTTEPNAPRRLAQKNKLPQPSKAITTTAQTGSRAAQPWPEPAIQERPPQRTTHGESE

SEQ ID NO: 282667 - protein, 30 aa, Glycine max
  unsure (1)..(30): unsure at all Xaa locations
  Clone ID: PAT_MRT3847_9726C.1.pep
ITKHLHINIAQFLLALKACAPLEKXFPTNS

SEQ ID NO: 282668 - protein, 52 aa, Glycine max
  unsure (1)..(52): unsure at all Xaa locations
  Clone ID: PAT_MRT3847_97270C.1.pep
LSXLSISSFLLLXXXLLXGKLYFXSSXXXSPLXQNITIXGSPIREIXRXPQX

SEQ ID NO: 282669 - protein, 525 aa, Glycine max
  Clone ID: PAT_MRT3847_97271C.1.pep
MLSATLPMSLTSAKAFSSRMVPFGHRLSPATLTGVSLSRSPLTLRCSPLSSTPSYVEEGAKFVEASKNGNLIPLCQCIFSDQLTPILAYRILVKEDDRESPSFLFESAEPSYHASSVGRYSVVGAQPTMEVVAKENKVTIIDHESGNLTEKIVDDPMMIPRKVSEGWKPYLINELPDAFCGKSPTVITMHMIKMIVFVIYAFIVYDVENPKMKENIKSSCRLHFYGYFSYDTVRYVEKKKLPFSNAPEDDRNLADIHLGLYENVIVFDHVEKKAYVILWVRVDRYSSAESAYKDGMERLEKLVAKLQDGQPPRLAPGSVDLHTHHFGPSLKKSSMTSEAYKEAVLQAKEHIKAGDIFQIVLSQRFERRTFADPFEIYRALRVVNPSPYMAYLQVYFCVTSETSSFIQESFMARGCILVASSPEILTRVKKNKIMNRPLAGTARRGKTPEEDARLEAILLRDEKQCAEHVMLVDLGRNDVGKLMNTSPSCVHSQLAYHKIEKLALGLGITRLALMTSTKVTLTLYC

SEQ ID NO: 282670 - protein, 259 aa, Glycine max
  unsure (1)..(259): unsure at all Xaa locations
  Clone ID: PAT_MRT3847_97272C.1.pep
MTSEAYKEAVLQAKEHIKAGDIFQIARGCILVASSPEILTRIKKNKIVNRPLAGTAKRGKTPEEDARLEAILLRDEKQCAEHVMLVDLGRNDVGKWLXKSGSVKVEKLMNVERYSHVMHISSTVTGELQEHLTSWDALRAALPVGTVSGAPKVKAMELIDELEVTRRGPYSGGFGYISFLGEMDIALALRTMVFPTGTRYDTMYSYKDVDQRHEWIAYLQAGAGIVADSVPDDEHQECQNKAAGLARAIDLAEAAFVDK

SEQ ID NO: 282671 - protein, 49 aa, Glycine max
  Clone ID: PAT_MRT3847_97273C.1.pep
QRREWIAYLQAGAGIVADSVPDDEHQECQNRAAGLARAIDLAESAFVDK

SEQ ID NO: 282672 - protein, 82 aa, Glycine max
  unsure (1)..(82): unsure at all Xaa locations
  Clone ID: PAT_MRT3847_97274C.1.pep
DAARSASGIDLTEPALMGIIMAVLTSRAVSSRMKRSTIFAISISSPISLVSMLXLALIRKFDFPLFMELIIRLHSENYYDNL

SEQ ID NO: 282673 - protein, 84 aa, Glycine max
  Clone ID: PAT_MRT3847_97275C.1.pep
WKNKIVNRPLAGTAKRGKTPEEDARLEAILLRDEKQCAEHVMLVDLGRNDVGKVCYRYILMDIPIYLSCSRCLEAIACSIILFI

SEQ ID NO: 282674 - protein, 89 aa, Glycine max
  Clone ID: PAT_MRT3847_97276C.1.pep
RERPFMDWLHAHTLTLARPLTAYSTYYRFLTCSLNSDHMRRRSISITASWHEQLAIVLLFCANPITAVKAIAKSTLGETLYRKTAERKT

SEQ ID NO: 282675 - protein, 192 aa, Glycine max
  Clone ID: PAT_MRT3847_97277C.1.pep
YFSYDTVRYVEKKKLPFSNAPEDDRNLADIHLGLYENVIVFDHVEKKAYVILWVRVDRYSSAESAYKDGMERLEKLVAKLQDGQPPRLAPGSVDLHTHHFGPSLKKSSMTSEAYKEAVLQAKEHIKAGDIFQIVLSQRFERRTFADPFEIYRALRVVNPSPYMAYLQVYFCVTSETSSFIQESFMVQLFHVL

SEQ ID NO: 282676 - protein, 219 aa, Glycine max
  Clone ID: PAT_MRT3847_97278C.1.pep
LNLQRCFLQHFQCPLRLQRPSPAAWFLPGHRLSPATLTGVSLSRAPLTLRCSSLSNTPSYGKNDNWVVEEGRKFVEASKNGNLIPLCQSIFADQLTPVLAYRILVKEDDWEAPSFLLESAEPSYHASSVGRYSVLGANPTMEVVAKENKVTIIDHESGNLTEEIVDDPMVIPRKISEGWKPYLIDELPDAFCVSDVENPKLKELVVYPFIVSDVEILWF

SEQ ID NO: 282677 - protein, 50 aa, Glycine max
  Clone ID: PAT_MRT3847_97279C.1.pep
IKYFLCHYNEGKSWSIINQNGGHIAQRFCSSTLIDERVVDLTKGARSLKA

SEQ ID NO: 282678 - protein, 97 aa, Glycine max
  Clone ID: PAT_MRT3847_9727C.1.pep
HVTIEVFVASPLALKGAHHVRYFMVSCSSSTRQATNTQIGINTILDCYYLSVPLNGYVLKQCKNSSTCLWLSTTVCFFTTTEGSGSQGLPCSMRKSL

SEQ ID NO: 282679 - protein, 42 aa, Glycine max
  Clone ID: PAT_MRT3847_97280C.1.pep
MKGKTIFHKMKEKVLGSSDADSGKGKIKMKKHIGHGVHLVKG

SEQ ID NO: 282680 - protein, 46 aa, Glycine max
  Clone ID: PAT_MRT3847_97281C.1.pep
KKKKKKKKKKKKKKKKKGLKSSGSTLKHAGSRPKGSTITCASLQCI

SEQ ID NO: 282681 - protein, 191 aa, Glycine max
  unsure (1)..(191): unsure at all Xaa locations
  Clone ID: PAT_MRT3847_97282C.1.pep
MGANHSREDLLESSDSEQEEHETFEDATEGSAERKPSTPSSLDDVEAKLKALKLKYSSNSTPAVNNAVKLYVHIGGNTPKAKWVTSEKLTSYSFKYNDSDNDNDNDDYDETNEKPFWVLKVGSKIRSKVGPEMGLKSFPEQRRVDFVVRGVWAMKFFSDQNQIDFIDSFQEXLFEDTHGVEAPGANELKST

SEQ ID NO: 282682 - protein, 54 aa, Glycine max
  Clone ID: PAT_MRT3847_97283C.1.pep
IKLQSVSLIIIQIHVQNTLSMIHIAKTISSSLVKLQMPMPYLISYKREEYEVIS

SEQ ID NO: 282683 - protein, 40 aa, Glycine max
  Clone ID: PAT_MRT3847_97284C.1.pep
FVHSLFTMFVVESIRLCSVVNSDKVCIAMLLSNSVILRSP

SEQ ID NO: 282684 - protein, 42 aa, Glycine max
  Clone ID: PAT_MRT3847_97285C.1.pep
SCIAAALFLFFSSPSIRSDETPIWLAPSGFLHRNRTGVEGFT

SEQ ID NO: 282685 - protein, 67 aa, Glycine max
  Clone ID: PAT_MRT3847_97286C.1.pep
HNFDHSIRTDTDLQKKTEGTALPEPCKRNTNNIMYPWNFEAYSLYKTNFFIHYALTIKVEGTTITRL

SEQ ID NO: 282686 - protein, 90 aa, Glycine max
  unsure (1)..(90): unsure at all Xaa locations
  Clone ID: PAT_MRT3847_97287C.1.pep
MGKSHIYWSADYQKAXYKAKNKLIALIASNGCATLMLRLAWTYAGTYDLSSKTXVPSXTIKHPYELAHGTYHGLYNPCRLLEPLKAEFPI

SEQ ID NO: 282687 - protein, 83 aa, Glycine max
  unsure (1)..(83): unsure at all Xaa locations
  Clone ID: PAT_MRT3847_97288C.1.pep
SAGKEAAXKGTAPQATRXGXKXXXKDXGDARXAXAARAXQASNAXAXEXXQXGEDGXKAXAPNNXXEAAGEKTXXKNNAGXPH

SEQ ID NO: 282688 - protein, 126 aa, Glycine max
  Clone ID: PAT_MRT3847_97289C.1.pep
GENRANSPPPKGTKKVSDERDPKEGDPAHRNTKPSSSHGGGAGFFFCSREKNPLSRERTICHLGQRGTFKGEGWREAPPPLASPASFPAVPRKAGGSPEIRGPRNSLVPGRPRGHGPPAVNRKPRQ

SEQ ID NO: 282689 - protein, 174 aa, Glycine max
  unsure (1)..(174): unsure at all Xaa locations
  Clone ID: PAT_MRT3847_9728C.1.pep
MATFFCLCKFATFSNISSRTFSSFLPSKTSIYHSLSSSSATFSFTWXDAFRISQPQTATQHRSTYLQAFFHKVQLCNRAPEKQSEFLPFIIEDHVVGFIHNGFVEHLRGFGNVFIFPKDKYNGGLYGDFVSLHPMLKTAEERTSAVGYVVERLGEEHIPGIRNELYPVISSFGA

SEQ ID NO: 282690 - protein, 458 aa, Glycine max
  unsure (1)..(458): unsure at all Xaa locations
  Clone ID: PAT_MRT3847_97290C.1.pep
MSTELNANSTFKTIKSCDINTEQDFSMENRILSDILQSHEAFNYNMSRKDFVLPELDGFGSSIGAGSDEIEISPHSQPLVGASSYINCNNNSTNTSCYSTPLSSSPKGMPLSLGTSTSSNSTVTEFSADPGFAERAAKLSCFGSRSFXSCRNTQLSLNNAELGLISSPLVENGKKQLPRVSSSPSLKVLGSQMDTGEKPSPYVNSRKRKGPSKGKAKETSTSTNPPMAAEASDDSNAKRSKPNEGEGNENGHKKAEEALKGGQATDSHSLAERVRREKISERMKLLQDLVPGCNKVTGKALMLDEIINYVQSLQRQVEFLSMKLASVNTRLDFSIESLISKDIFQSNNSLAHPIFLIDSSAPPFYGQHPQPNPAVHNNIPNGTMTHNSVDPLDTGMWIPGFGMHLPHLNDFNEGGFQYPKPFSEDDLHTIIQMGFGQNANRITPIQSQSFNGSNQVPL

SEQ ID NO: 282691 - protein, 159 aa, Glycine max
  unsure (1)..(159): unsure at all Xaa locations
  Clone ID: PAT_MRT3847_97291C.1.pep
MELANSQEESTISEQTPNGDTGVKPSPYVNSRKRKGPSKGKAKETSASINPPMAAEASEDWNAKRSKPNAGEGNENGQVKAEEESKGGNSNANDEKQNKSNSKPPEPPKDYIHVRARRGQATDSHSLAXRVRREKISERMKQSKGGVRYLNEEHGFTSN

SEQ ID NO: 282692 - protein, 72 aa, Glycine max
  Clone ID: PAT_MRT3847_97292C.1.pep
EKKMGNIRTKEGSIRPSDNNGLIIQGVVQIKYLLVVYSNSLPITPSFNSAVMNGDQSLSFIGVLDFSPRNCE

SEQ ID NO: 282693 - protein, 70 aa, Glycine max
  Clone ID: PAT_MRT3847_97293C.1.pep
HSLLFGIMRPYELYFLPIYLGFFPFCHFGQYVRLLNCLEFGRLANSLFFYTSTCLACQCMKSFVSSPKKK

SEQ ID NO: 282694 - protein, 139 aa, Glycine max
  Clone ID: PAT_MRT3847_97294C.1.pep
KEAIKERQGQRLREMAEAKRSSRINELENELHGLEFLLKQLEQVEDSNVPSFLAATGYVSRQEIESARAKVTQSLRKAKGEPKNEQAETDNASPDANEKYSLINIPDDMLTTDQLIEKKKQLSLKSMSEGRQRLKQKRY

SEQ ID NO: 282695 - protein, 212 aa, Glycine max
  Clone ID: PAT_MRT3847_97295C.1.pep
TSRRWLHVQDFNRQSLQFECSSTALRPLSSSTKGFDIHTFHLHRLLRRFQHLKSLSLSNCSELSDSGLTRLLSYGSNLQKLNLDCCLKVTDYGLSLVASGCPSLMSISLYRCPGITDKGLDTLASACLSMKYVNLSYCSQISDNGLKAITHWCRQLQAINISHCEGLSGVGFGRCSKTLAYIEAKSYKLKQERVIEIINNRRIKYLDISYLN

SEQ ID NO: 282696 - protein, 58 aa, Glycine max
  Clone ID: PAT_MRT3847_97296C.1.pep
VLMMLSCFNKAKLYEFYLANSTYEPHCYSSINYLIDEHLISKHLTGTILTLQIEQSSV

SEQ ID NO: 282697 - protein, 90 aa, Glycine max
  Clone ID: PAT_MRT3847_97297C.1.pep
MELCTSEVEMASQHSPQPQKKKGGIVTMPFIMANEALASVANIGLQPNMILYLMGSYRFHLAKATQVFLLSSATSNLTPLIGAFIADSCL

SEQ ID NO: 282698 - protein, 120 aa, Glycine max
  unsure (1)..(120): unsure at all Xaa locations
  Clone ID: PAT_MRT3847_97298C.1.pep
MGKKQHSKDRMFITKTEWATEWGGAKSKENRTPFKRLPFYCCSLTFTPFEEPVCTPDGSVFDNMNITPYIVKYGKHPVNGAPLKHQDLIPLTFHKTXSKAEYHCPVLNKVFTEITHIVAV

SEQ ID NO: 282699 - protein, 153 aa, Glycine max
  Clone ID: PAT_MRT3847_97299C.1.pep
GRIPNVIAKLMGLDILPDKVEKESKRAMLQKREGTSPKHAAKGSTKKTELKSKETDNLMPMKNQKVIEAFKVPATQGKEMIFGANKKLLVEKTSSEVAVRNGIIALKGFDKPSIKADKPTKSSPQKNLTRESQKDVQEIGRKQNHPNNNNREQ

SEQ ID NO: 282700 - protein, 75 aa, Glycine max
  Clone ID: PAT_MRT3847_9729C.1.pep
ALSGYVQTRHSPHSLPWNRIVRLRILADVFAFLRPQGFYTNPQERHQTKGVCFIPCNTHRLKSGSIALLVVFYVT

SEQ ID NO: 282701 - protein, 84 aa, Glycine max
  unsure (1)..(84): unsure at all Xaa locations
  Clone ID: PAT_MRT3847_972C.1.pep
MSRAQGAHQSFCRFGSPVRMMSAKSPKISXQLGESLHANEATLEERLQKLICKSKAEILRXGSMTLAMHLLCESHDGMETIITE

SEQ ID NO: 282702 - protein, 48 aa, Glycine max
  unsure (1)..(48): unsure at all Xaa locations
  Clone ID: PAT_MRT3847_97300C.1.pep
GSGKKVFSSLIWCSTFPLLLDVGLHLTLVIQHVRVKRRKYQYILRXLX

SEQ ID NO: 282703 - protein, 37 aa, Glycine max
  unsure (1)..(37): unsure at all Xaa locations
  Clone ID: PAT_MRT3847_97301C.1.pep
IKIMKWGKWVAVIIXPNKRARIWFGVYTTPLNGAGAY

SEQ ID NO: 282704 - protein, 80 aa, Glycine max
  Clone ID: PAT_MRT3847_97302C.1.pep
KRRSVFPCSSVYFFNSEVSFPGGGGGQIFVGESSFFQLSEKRFPEIANIRVGIVEHLVLPWGRLCTDLNPKKGDGIRRRL

SEQ ID NO: 282705 - protein, 292 aa, Glycine max
  Clone ID: PAT_MRT3847_97303C.1.pep
MQASEQHRNSSMYYQPLQQIEAYCLPQYRTLNPQLYYHDGGHGTQFSTPSSSELYCTLESSSVAGSFTLYNSPSTVSFSPNGSPISQQDSQSYPPDQYHSPENTYGSPMSGSCITDDLSSFNLKHKLRELESVMLGPDSDNLDSYDSAISNGNNFVPLEMDGWKQTMVAISSKNLKHILIACAKAISDNDLLMAQWLMDELRQMVSVSGDPFQRLGAYMLEGLVARLAASGSSIYKSLRCKEPESAELLSYMHILYEVCPYFKFGYMSANGAIADAMKDEDRVHIIDFQIGQ

SEQ ID NO: 282706 - protein, 275 aa, Glycine max
  Clone ID: PAT_MRT3847_97304C.1.pep
MLGVFINRILILVLGYAYPGFECYKTVEKNRVDIEELRFWCKYWIIVALFTVLEKFTDIFVGWVPMYGEMKLVLFVYLWYPKTKGTGYVYETLLRPYVSKHENEIDRTILEWKARGWDYVIFYWQYCAKFGQTAFVHALQHLASQSTRFSANPTTQKNDMQGQSAPPQAAPTQAQASFMKQSSTLSKSKKWPPSPPNATTETVEVHHVSQTEYVDEEDEEPCQPEPVTIIDGQDQSVSVKDRINRARARLRRLDSQQQQSPRTPRTLPSPHRQQM

SEQ ID NO: 282707 - protein, 68 aa, Glycine max
  Clone ID: PAT_MRT3847_97305C.1.pep
TLGASESLNRGTHNLSCKFIWSLLNSRVSTVCVGGGSKCWGFSLIESLFSFWGMHTLDSNAIKQLGKI

SEQ ID NO: 282708 - protein, 64 aa, Glycine max
  unsure (1)..(64): unsure at all Xaa locations
  Clone ID: PAT_MRT3847_97306C.1.pep
RVSYVAHYVNQPQEKDLLEGNFSFDIKSRSXLEKGFSTKAPFGSGKTSKYYINGAWSHSLKEFS

SEQ ID NO: 282709 - protein, 63 aa, Glycine max
  unsure (1)..(63): unsure at all Xaa locations
  Clone ID: PAT_MRT3847_97307C.1.pep
IIYQNETTVSYHLSVPHSYIGLYACMCVLCSSILASNINFSLKKQTFVIQQIISFSSLSQSWX

SEQ ID NO: 282710 - protein, 360 aa, Glycine max
  Clone ID: PAT_MRT3847_97308C.1.pep
MTESNNEVNLSESKSVVPLNTWVLISNFKLAYNLLRRADGTFNRELAEFLDRKVPANTIPVDGVFSFDHVERSTGLFNRVYQVAPENMGRFIELEKPLSTTKIVPVIIFFHGGSFSHSSANSAIYDIFCRRLVSNCKAVVVSVNYRRSPEYRYPCAYDDGWSALNWVKSRTWLQSGKDSKVHVYLAGDSSGGNIAHHVAVRAAEEDIEVLGNILLHPLFGGEKRTESETKLDGKYFVRLQDRDWYWRAFLPEGTDRDHPACNPFGPKGKNLEGLKFPKSLVCVAGLDLLRLWLPKSLVCVAGLDLLQDWQLEYVEGLKNCGQDVKLLYLKEATIGFYFLPNNDHFYTLMEEIKNFVNPNC

SEQ ID NO: 282711 - protein, 139 aa, Glycine max
  Clone ID: PAT_MRT3847_97309C.1.pep
MASSIFRSLQVHPFMLYPTTFLRRRNGVFHLTTKATQSQTDTQQRQPQTKVSSSNSTQSKKLDKIPKDYEAIIGIETHVQLSTLTKAFCGCPYSYGSSPNSSICPICMGLPGALPVLNSKIIDFAVKLGLALNCNLAFK

SEQ ID NO: 282712 - protein, 62 aa, Glycine max
  Clone ID: PAT_MRT3847_9730C.1.pep
YIKTFVLCFCHQLSDDVAPSQPLIVLGRSICKVTHHHLIDGRDSTKISIYLGLGVFKNTGLD

SEQ ID NO: 282713 - protein, 80 aa, Glycine max
  Clone ID: PAT_MRT3847_97310C.1.pep
EGGIVNVDPTPFTGFTSKVVHFFHKLVVKFLSNSSLTLHYFSSNFTPVSDTSPPNDLPVKGYLPDCLIVQFVISQPYPIF

SEQ ID NO: 282714 - protein, 30 aa, Glycine max
  Clone ID: PAT_MRT3847_97311C.1.pep
SVIRYTFIYIDLITYLIFISVQFLYIRCNN

SEQ ID NO: 282715 - protein, 95 aa, Glycine max
  Clone ID: PAT_MRT3847_97312C.1.pep
GTAPSTRYDNVVAILLDTGMAATGRQMALNGLNSAAVALRGLNFSMRASHVVTCRICNPYSIHRSSMYTTIIVSMLWYRSIIPRATPFLIECDYS

SEQ ID NO: 282716 - protein, 77 aa, Glycine max
  unsure (1)..(77): unsure at all Xaa locations
  Clone ID: PAT_MRT3847_97313C.1.pep
YTAXVNIRFILTPMRYRLTTVNVRRHAPLYFSHSCTTVLPFSRAPPLLPFFISSPSPLPAPRARTISFSFSCKFVRI

SEQ ID NO: 282717 - protein, 66 aa, Glycine max
  Clone ID: PAT_MRT3847_97314C.1.pep
HEDLTSKSITAMQSYDKRKQADTLCDSTNGWLYNDSCSMIIDQLSKHFDLTILLSSLSRKVNICAH

SEQ ID NO: 282718 - protein, 65 aa, Glycine max
  Clone ID: PAT_MRT3847_97315C.1.pep
DCISDKEELCLTIHTALKFAMLARPYDRRIKSIPYFYMGPIYICFTRGNSYSKHLLLIEDYSYLV

SEQ ID NO: 282719 - protein, 74 aa, Glycine max
  unsure (1)..(74): unsure at all Xaa locations
  Clone ID: PAT_MRT3847_97316C.1.pep
SCCGGNXGCGSDCKSGNGCGGCKMYPELRYKESTSTETLDFFFFPAKAELERAVLCVPAENDGCKCGGNCTWNP

SEQ ID NO: 282720 - protein, 53 aa, Glycine max
  Clone ID: PAT_MRT3847_97317C.1.pep
CMFSAHANLFEEYASTNTTSLDFWTRHGRFCIGLHALQKLNVWFSIFLNRLVL

SEQ ID NO: 282721 - protein, 477 aa, Glycine max
  Clone ID: PAT_MRT3847_97318C.1.pep
MGCSQDANFYKGSLCCQLILFFIWLPTFQDVTAREIHADHRRISSLLELAKEPPSGESALFDPIEISPAVLPKFPYPTESWPPMYPTFPTRYEPVLTGKCPVNFSHSDISSILDKTASDCSGPLAALVGNVICCPQFSSLIHIFQGFFSMKSDHLVLPNAVADHCFSDIISILASRGANSTIPTLCSIKSSNFTGGSCPVKDDSTFEKTVNTSKLLEACSTVDPLKECCRPVCQPAIMDAALQISGRQMMINNDENMAGEVNHTDYLNDCKSVVYSYLSKKLSFEAANTAFRILSACKVNKVCPLTFKEPTEVINACWNVAAPSPSCCSSLNTYITGIQKQMLITNKQAIICATLFGSMLRGGGVMTNIYELCDVDLKDFSIQAYGQQGCLLRSLPGDVIFDNSSGFSFTCDLSDNIAAPWPFSSSSFASMSLCAPEMSLPALPTSFQTLKNNGCTSDGVGLLVLIFSSFIFSTLLY

SEQ ID NO: 282722 - protein, 82 aa, Glycine max
  Clone ID: PAT_MRT3847_97319C.1.pep
SIIYVHIYISSITYIPPGIQCRYINSLITPYIYTSCVVFQCVANIYISSPPNGNLICWGCSLCAQLLIYIFPGGSCHCVTQV

SEQ ID NO: 282723 - protein, 110 aa, Glycine max
  unsure (1)..(110): unsure at all Xaa locations
  Clone ID: PAT_MRT3847_9731C.1.pep
CSXVXXXXXCFSCXCPXXCLXPXFSGPXXXCXXWLCVAXFXPCAXAXXGXXCLXXXPXXXXXXPXXPSSVPXLXVCFLXXXXXXCXXGFSXLVLPPLALCFXXXXSXXXX

SEQ ID NO: 282724 - protein, 57 aa, Glycine max
  Clone ID: PAT_MRT3847_97320C.1.pep
SITFTTINNLPALLFYIYHDSTQHHLLLDLLLTPIQYNFNYLLRLLYFSSIYLQILI

SEQ ID NO: 282725 - protein, 113 aa, Glycine max
  Clone ID: PAT_MRT3847_97321C.1.pep
NWASQQPGFTHTPFIFHSLLKSLSHTNHFTAIHSLLKQAKALNFPILPSLLSSIIASHIARNSAREAFLLFSGVGSLCSEIGGATCNFLLAALALDGCLKSAHRVFDEMAEKG

SEQ ID NO: 282726 - protein, 44 aa, Glycine max
  Clone ID: PAT_MRT3847_97322C.1.pep
LRESCKDQNPKPPKELLVDERGEQEKVGAAKRVIGGNTWGFAAT

SEQ ID NO: 282727 - protein, 85 aa, Glycine max
  Clone ID: PAT_MRT3847_97323C.1.pep
FFLFLFFFIFIFYFFFGGFKLKPKSHSPFSDFPGAPNIFSNIETSPKHPGKIFLWKIKSFLKAFLAQGTKVFGTSWGEQKGQSFS

SEQ ID NO: 282728 - protein, 106 aa, Glycine max
  unsure (1)..(106): unsure at all Xaa locations
  Clone ID: PAT_MRT3847_97324C.1.pep
XXXERXAERXKAGQEXXPSSGKTDRAAXPXEXXDXXKXXRXQXKGPSXXRPGGXXAXXQXXXXXPXXAXEGDQDXEGXXXEQAXDKGXXXGTEQQGXKXKEEXXGA

SEQ ID NO: 282729 - protein, 87 aa, Glycine max
  Clone ID: PAT_MRT3847_97325C.1.pep
LLIDCQVLSLIINEGTNIYGRRLACRTFKCYHCYTNYICGPTTGACGNPSNRSIILLRSLFKLTRGFTYPYPDILVLLKCKYKHPAF

SEQ ID NO: 282730 - protein, 45 aa, Glycine max
  Clone ID: PAT_MRT3847_97326C.1.pep
FCLSQQEEVLLFMKLTHSVLNQLKLHTEHMLCIKLNNQHTSNTLY

SEQ ID NO: 282731 - protein, 131 aa, Glycine max
  Clone ID: PAT_MRT3847_97327C.1.pep
PFSSRCCHSSPTELWCCISWSCWSICHPAFSCRTQVSNWFINARVRLWKPMVEEMYQQELKEAESAEDRENNNSNISGNQAQTLLLALLQPVLSLLPHRTLVLHLLELLEYLPPCFQLPPLFSIRYSTRLF

SEQ ID NO: 282732 - protein, 60 aa, Glycine max
  Clone ID: PAT_MRT3847_97328C.1.pep
YYYNIMPPNISNSTVNGKYRVTFNSTAFSKTLLYLIPCACTAEQKSLPRCRSLRTHSLTL

SEQ ID NO: 282733 - protein, 97 aa, Glycine max
  Clone ID: PAT_MRT3847_97329C.1.pep
NRLDLVLNLTVQTGAALVIEVLKKLVVVQLEGVITTSNISVHKTLGLQPTANYLVGVLLNNVGLQLTPHNGVLKVNKRYVLKGVNRYSYCIGVLPTC

SEQ ID NO: 282734 - protein, 67 aa, Glycine max
  Clone ID: PAT_MRT3847_9732C.1.pep
QHSLLLFAMPTHFLAKPNTPFPVDCSGPCDPLTLTTNFSVRFSLCSKHGLFQIIFLTYFSKLTTICK

SEQ ID NO: 282735 - protein, 69 aa, Glycine max
  Clone ID: PAT_MRT3847_97330C.1.pep
PYKNTERGDILYEQTFRRHSEDFFPKSGNCFRKHRPLTSLDTLLATLDPITHGGAIRWGVSLNSGSVGV

SEQ ID NO: 282736 - protein, 109 aa, Glycine max
  Clone ID: PAT_MRT3847_97331C.1.pep
LFKRSLLAMVAFLVLAMVAFLVLSDVNIRILERQRKRNKKCKKCQQFSNGLECLLLHKTLISCIYIWVNVFLVRKLESGGIWFGTRYVSAFGLLGILGFSECVISKQRR

SEQ ID NO: 282737 - protein, 144 aa, Glycine max
  unsure (1)..(144): unsure at all Xaa locations
  Clone ID: PAT_MRT3847_97332C.1.pep
QDRLEVLRGPNCHPKWHCFVAGDPDNRTELIXTDHDDAISVPEHETKTDRAAYLARHTTALWDDFGDFQFLRIEPRGVRFVSGAATPVLGSREPSGDEYAYCKHDPIAQIYQPAASDMNKDHAEDNTVNVQHWTSVPADCAFIL

SEQ ID NO: 282738 - protein, 49 aa, Glycine max
  Clone ID: PAT_MRT3847_97333C.1.pep
GAAYAYTLGAITGSIESVIYVAFVYTDTALEKPDYYATVDVDPNISTYS

SEQ ID NO: 282739 - protein, 85 aa, Glycine max
  Clone ID: PAT_MRT3847_97334C.1.pep
PPPAPFDLLIRPPGVAIFVWVLFSRGSLFPHRHTVFSLLFPKLLIRSPICKSGPPPRPVPFFLGLPPPLPPFCFYLFLTFFFILL

SEQ ID NO: 282740 - protein, 45 aa, Glycine max
  Clone ID: PAT_MRT3847_97335C.1.pep
SSLEHRHVSTLCTLANLQVLLRLHSQMSFPLHSHLRSQCLLDLIT

SEQ ID NO: 282741 - protein, 51 aa, Glycine max
  Clone ID: PAT_MRT3847_97336C.1.pep
WSGKSATCAHAMETAINGYGGRSLVYCVEGGFTRKLKYPLLMWVFLIWSST

SEQ ID NO: 282742 - protein, 74 aa, Glycine max
  Clone ID: PAT_MRT3847_97337C.1.pep
MLCCGGAEEDFGIPPGNQYNASPKKGNAYNGGGGGDRARPRGNVVKNGAPQKTLPIEIPAISLDELDRLTSNLS

SEQ ID NO: 282743 - protein, 55 aa, Glycine max
  Clone ID: PAT_MRT3847_97338C.1.pep
HAFVRVREDNRRGTNTALSVSAAKTMVLLQLDPYLNELTCMFEQHTKHGFVWVTL

SEQ ID NO: 282744 - protein, 300 aa, Glycine max
  Clone ID: PAT_MRT3847_97339C.1.pep
MSDSLLTFYSLSAILALLPIFIFILIKRKQSKPRLNLPPGNMGWPFLGETIGYLKPYSATTVGEFMEQHIARYGTIYKSKLFAGPAIVSADAGLNRFILQNEGKLFECSYPRSIGGILGKWSMLVLVGDMHRDMRVISLNFLSHARLRTHLLKEVEKQSLLVLNSWSQNSIFSAQDEAKKFTFNLMAKHIMSMDPGDIETEQLKKEYVTFMKGVVSAPLNLPGTAYRKALKSRSIILKFIEGKMEERVRRIQEGNESLEEDDLLNWVLKNSNLSTEQILDLILSLLFAGHETSSVAIALA

SEQ ID NO: 282745 - protein, 53 aa, Glycine max
  unsure (1)..(53): unsure at all Xaa locations
  Clone ID: PAT_MRT3847_9733C.1.pep
NWEKLMNMVGSVITGGKGTARRXKKVVHKTTTSYEARLQSTVXRIWVNAIPAV

SEQ ID NO: 282746 - protein, 209 aa, Glycine max
  Clone ID: PAT_MRT3847_97340C.1.pep
MNLALYSVLFCVHAVFAASSNGHGHKSQDWLNHGGDLFNRRYAYKEHKISPKTAPNLRLKWKFNAGKDISATPAIYDGTLYFPSWNGNIYAVKEADGSLVWKQNLQNLTGINATGYVTTVNWTVSRSTPTVAGDRLIIGVYGPCILIAVNRTTGELVWKFTLDKKIAVSITMSVSYYNSWVCPPLCGFPPKKTFEQCCTFRGSFCKLNA

SEQ ID NO: 282747 - protein, 52 aa, Glycine max
  Clone ID: PAT_MRT3847_97341C.1.pep
GRYFLQHIHSLKVVAAHVQSASTNPLEYQIKGIHGYEFRNEQERKKVQVIVY

SEQ ID NO: 282748 - protein, 54 aa, Glycine max
  Clone ID: PAT_MRT3847_97342C.1.pep
KKELDLLPAAAQSSVCLQGYVDECKAAGYEQVNVEYNMTYSYHAMCAYFDKDNV

SEQ ID NO: 282749 - protein, 70 aa, Glycine max
  unsure (1)..(70): unsure at all Xaa locations
  Clone ID: PAT_MRT3847_97343C.1.pep
XYVXXGIXXRXIXXXIXXXIKLKXGXTXRESXPXDXEXFVXVXCXXXSDXEAXNXXECXGLQPLXLYDXV

SEQ ID NO: 282750 - protein, 207 aa, Glycine max
  Clone ID: PAT_MRT3847_97344C.1.pep
FSLIRSIMRTRNADSASKSATPKKTPPPPPRKSPAAKRTTATKTRATKKNEVSPAPDSNPYQSPLEQESLGSASSAKFVKKKTPGRPRSKAIDTPNSEEQCEAVTDGTLIEDDTEVVEKVEDVGVVGAGSVEGEKEGGQGVGSVGLSDETEGKSMEVNEPVVEKVCELVEKGNDVMEVEVAASQDASVSFKRLGRPIVDLNISADNE

SEQ ID NO: 282751 - protein, 116 aa, Glycine max
  Clone ID: PAT_MRT3847_97345C.1.pep
LNEQIAYHRKQVQQYKEVSLWSQTLDKTVGIMAKLVCIVYARICSVFGGYISNCNCYEINDVDNNNNNCCCLLEHRELYKKNYCLYEESLQKRVTRSGPIPKASNNNKTGVIRFFD

SEQ ID NO: 282752 - protein, 54 aa, Glycine max
  Clone ID: PAT_MRT3847_97346C.1.pep
FLPRKLKTPRFLASTSELSYLIWGSSAMKDSLTAVKVRLGSISHLDRWRDRTRG

SEQ ID NO: 282753 - protein, 211 aa, Glycine max
  Clone ID: PAT_MRT3847_97347C.1.pep
MDHKHYQSPLDPSSSFPTTTTNRDHYLKQRGKLSHNISKPNNIKKPTFVVSSSQSLTHNNTFNKQHALPAESQPQVYNISKDDFRDMVQKLTGSPGHSPQPKPVATSRLHRLRPPPLPQVVSHRPPPPNSGKVAVAPPSPLPPFPTVHAESPVSAYMRSFLRNSVPSSSSESEFQLPFSPVTFGCFNSLGGGSPIPLSPTVPVSSPRWRDL

SEQ ID NO: 282754 - protein, 113 aa, Glycine max
  Clone ID: PAT_MRT3847_97348C.1.pep
TTRPQTVEENPLRKRLKREGKDRGKRQTPSSHSSVLNSSLITHLSSDTLHHLSCPWLISCTLYDVLEYAATDSTKMKVVEQNAFRRHERRLLTESPNAKESLATAIQKPFLAT

SEQ ID NO: 282755 - protein, 57 aa, Glycine max
  unsure (1)..(57): unsure at all Xaa locations
  Clone ID: PAT_MRT3847_97349C.1.pep
GISKDGQTREHALLAFTLGVKQMICCCNKMDATTPKYXKARYDEIVKEVSSXLKKVG

SEQ ID NO: 282756 - protein, 159 aa, Glycine max
  Clone ID: PAT_MRT3847_9734C.1.pep
RTSVVADGHCCCCGQQLVCVDIDDVETEKFAGSVAALAFEREVKANFSEFQAWLEKHASYEAIVDGANIGLYQQNFADGGFNISQLDDVVKELYNRSGKKWPLVVLHNKRLRGLMENPSSRRLVEEWMKNGVLYTTPNGSNDDWYWLFAAVKLRCLLVT

SEQ ID NO: 282757 - protein, 79 aa, Glycine max
  Clone ID: PAT_MRT3847_97350C.1.pep
MTVKVYIVYYSMLGHVERLAQEIKTGADSVPGVESQLWQVPETLSTEELEALRAPPKSDVPIITRNELRDADGFVFGFP

SEQ ID NO: 282758 - protein, 87 aa, Glycine max
  unsure (1)..(87): unsure at all Xaa locations
  Clone ID: PAT_MRT3847_97351C.1.pep
PTEARSSSLQNPTQPIKXLRGTRNTTPTLTQYSQRNYFQPSRSCAVLRSTVPTWPRTAEHGWIERESNSHVSLALPLLRSSRYGRVA

SEQ ID NO: 282759 - protein, 162 aa, Glycine max
  Clone ID: PAT_MRT3847_97353C.1.pep
MMAQLSFLAVFLFVFFDTGVFSKIVGTEVEVEDVETTEIRMPGVSVEHNETYLCTSYPLNMLETNYIVGFDPIADMHEVHHILLFGCEEPGSEDPVWDCGEMSIARTQYRRAPTCATQPQILYAWGKGAPKLELPKGVGFPSVGNSKSLCVYKPYMHKLIRD

SEQ ID NO: 282760 - protein, 50 aa, Glycine max
  unsure (1)..(50): unsure at all Xaa locations
  Clone ID: PAT_MRT3847_97354C.1.pep
KKTVRVPAISSKVSXXXXDEYYVGDVRTDAYSIYHLTRGEWFVARDMVLA

SEQ ID NO: 282761 - protein, 52 aa, Glycine max
  Clone ID: PAT_MRT3847_97355C.1.pep
SDTLKASLFALPNTLIFLRNFNRLFQNNISVFITCSCISSLHRLYQKRQSGN

SEQ ID NO: 282762 - protein, 152 aa, Glycine max
  Clone ID: PAT_MRT3847_97356C.1.pep
MRDNMTMTATTDQWMQFYQQPLMDSHGHDHDHDHDHHALAPNTTEGFSSSPTPTMPSSESNSILSQLSPKGNVSKPIRRRSRASKRTPTTLLNADPTNFRALVQQFTGCPRTTMSTLGVHKGPITLNFQQRNSSTEQKVHHHNTSSTVVLPS

SEQ ID NO: 282763 - protein, 152 aa, Glycine max
  Clone ID: PAT_MRT3847_97357C.1.pep
MRDMTMAAITDQWMQFYQQPLMDSHGHDHHALAPISTELGFSDATVTTTTSSPTPTMPSSESNSILSQLSPKGNVSKPIRRRSRASKKTPTTLLNANTTNFRALVQQFTGCHSTTMPTLGVQKGPITLDFLQGNRSGPKVHHNTSRWVVLPF

SEQ ID NO: 282764 - protein, 65 aa, Glycine max
  Clone ID: PAT_MRT3847_97358C.1.pep
SLLTVIFSLPSPLTPNNYSITIPLLNNVNSTYSLQSSLKHKQDINMQFVFCYSSSGIKGQITKPS

SEQ ID NO: 282765 - protein, 56 aa, Glycine max
  unsure (1)..(56): unsure at all Xaa locations
  Clone ID: PAT_MRT3847_97359C.1.pep
VSCIVRKLGIRLEXKXXITRXRXSXIXXXKHLGVSXWXXYXFAXXXLLYNWSXYFX

SEQ ID NO: 282766 - protein, 186 aa, Glycine max
  unsure (1)..(186): unsure at all Xaa locations
  Clone ID: PAT_MRT3847_9735C.1.pep
RLLVYEFMSNGTLADVLFGQSKAPIWNTRVGLALGIARGLLYLHEECDSAIIHCDIKPQNILIDEHFNAKISDFGLAKLLLFDQSRTNTMIRGTRGYVAPEWFKNVAVTVKVDVYSFGVMLLENICCRRSVMTMEPEEEEKAILTDWAYDCCVEGRLPXLVENDREALSDIGRLQRWVKIAIWCIQ

SEQ ID NO: 282767 - protein, 134 aa, Glycine max
  unsure (1)..(134): unsure at all Xaa locations
  Clone ID: PAT_MRT3847_97360C.1.pep
AIKSKPPQKKFPTKPKGPPIGNPXGIPKAASKLLQPPNPPQKKNQPPGGPKRKEKRAHPGGSKTCKANPKTPTLQKPFQNTHNPPKGCPPLQGRVNKTATPGPEAPKRGTNLGPGEPQPLSRANPHRPIRGLKT

SEQ ID NO: 282768 - protein, 45 aa, Glycine max
  unsure (1)..(45): unsure at all Xaa locations
  Clone ID: PAT_MRT3847_97361C.1.pep
AIPPKVFAHFYNLXQSQVFEFKKXGNWGPLVNPESQQGPPRVKVA

SEQ ID NO: 282769 - protein, 43 aa, Glycine max
  Clone ID: PAT_MRT3847_97362C.1.pep
LFFLKLPYHVNYTQLLKDKNYKKKLLIIIRMHNYCLINHKFLR

SEQ ID NO: 282770 - protein, 93 aa, Glycine max
  Clone ID: PAT_MRT3847_97363C.1.pep
KQRMAEFLGQLLGQLLQSGVGEEPMEATHPRHSPNPGAVAHPRHSHKELPRASFNNTGTQNIRGLINNTGCTKGNGNGSIVFGGFDSSNKSCY

SEQ ID NO: 282771 - protein, 59 aa, Glycine max
  unsure (1)..(59): unsure at all Xaa locations
  Clone ID: PAT_MRT3847_97364C.1.pep
IVPHLPPYFSFLHXLTYQHFPTDVRVXDSECNTTERICDDSGEEPDCCMCISMIGSRIQ

SEQ ID NO: 282772 - protein, 85 aa, Glycine max
  unsure (1)..(85): unsure at all Xaa locations
  Clone ID: PAT_MRT3847_97365C.1.pep
PPPPPPXTCPNLEICFNVRLSIPLPGNISGCCNLLTPISNNNASRCLCTTGRAQFPRAIESVLTSTMRFMLVSCGYSGASNYSCN

SEQ ID NO: 282773 - protein, 54 aa, Glycine max
  Clone ID: PAT_MRT3847_97366C.1.pep
SFFFFLKYTTDKTGIPSDSLGLNLGQRIFSLWVCHDCGKLNQEPLGWGLSPRKT

SEQ ID NO: 282774 - protein, 59 aa, Glycine max
  Clone ID: PAT_MRT3847_97367C.1.pep
YHRKASFVSVVCIIGWCDEGHGHDKGHEAYVSHLAWPLPPRQPDLDVCSVKTIYCPDAW

SEQ ID NO: 282775 - protein, 97 aa, Glycine max
  unsure (1)..(97): unsure at all Xaa locations
  Clone ID: PAT_MRT3847_97368C.1.pep
MTLGNHHDLLPGLVLILRLDTSVISFSHHGPYAWDGEATYXFTTDHPVQNYKGXSNVENYLXHLGYIPNAPHLDDNLDDTLVTAIEAYQANYNIDVS

SEQ ID NO: 282776 - protein, 77 aa, Glycine max
  Clone ID: PAT_MRT3847_97369C.1.pep
TSSSPLCDWIGPCCYKVLYGEVKNNMHTSMTHCGYYMSSVTNLEIFNFFILNYNQCSGNMNIFFSRRLLSCEANSLI

SEQ ID NO: 282777 - protein, 64 aa, Glycine max
  Clone ID: PAT_MRT3847_9736C.1.pep
ELFHSVLGKFCFTAKLVLVVFLASALMPSIDFNPINLGGHIELLHLEWDSIKIFYRKDGLHTLR

SEQ ID NO: 282778 - protein, 72 aa, Glycine max
  Clone ID: PAT_MRT3847_97370C.1.pep
PIEELLILHGINASMLLRYFYYAHEANQKHALALTSEYVGPPIVTCSFIKPIKASGWELHRDSASALVLNLE

SEQ ID NO: 282779 - protein, 77 aa, Glycine max
  Clone ID: PAT_MRT3847_97371C.1.pep
SKHYYTTEDEQLRRNPCTSRHLISGNETLKTPDISVKKILSDNDQQKHYKVCSTCNSVGSDVSKEKNITDRVLYVCT

SEQ ID NO: 282780 - protein, 84 aa, Glycine max
  Clone ID: PAT_MRT3847_97373C.1.pep
KTRREPRVHISSHYIHKTHFTPSFTKKQYPRAIYQTTSIIYNHIFLYQIAFVLLFSSLFIHTSLAHIVCDDPPKEICCFLIIFI

SEQ ID NO: 282781 - protein, 156 aa, Glycine max
  unsure (1)..(156): unsure at all Xaa locations
  Clone ID: PAT_MRT3847_97374C.1.pep
MQETQIVVGVASVCSLLAIVATLVVVPSLYSQINEISLKVHDGVQAFRVNTDSAWNELMEVQITVTPPAKPRENPFVSIFRSKRQLPGHCQCAGVQQPQCPPGPPGPAGAPGQPGYPGQAGEPGQPGMPGQPGAPCPDVPHVCQHCPAGPPGKXRD

SEQ ID NO: 282782 - protein, 154 aa, Glycine max
  unsure (1)..(154): unsure at all Xaa locations
  Clone ID: PAT_MRT3847_97375C.1.pep
KGYLKDVGAVIELYRASQAIIHPDESILVRQSLWTKHLLKQESSPYRLYADKLRSYVDLEIKDVLNFPYHANLERLLNRRSMEHYNTVETRILKASYRSCNLANQEILKLAVEDFNICQAIHIEELKQLSRWVGERRLDTLKFXRQKLAYCYFS

SEQ ID NO: 282783 - protein, 101 aa, Glycine max
  Clone ID: PAT_MRT3847_97376C.1.pep
IALAGGASALLLQSASADDVVALSEDNFEKEVGQDRGALAEIYAPWCGHCKKLAPEYEKLGGSYNKAKSALIGKVDCDEHQTLCRKSGVSGYPTIQWYPKG

SEQ ID NO: 282784 - protein, 64 aa, Glycine max
  Clone ID: PAT_MRT3847_97377C.1.pep
GIRFNMYKLRESKVLLFLDLTFITCVSNNGSLRKNKLDNTVNNKLCQCRTVISHAIATCDTRMF

SEQ ID NO: 282785 - protein, 51 aa, Glycine max
  Clone ID: PAT_MRT3847_97378C.1.pep
NLMESYILIMIRNLQTHNVISWDFIPISIIHRDVCFLTVYMRRCKTKEIGG

SEQ ID NO: 282786 - protein, 23 aa, Glycine max
  Clone ID: PAT_MRT3847_97379C.1.pep
GLSPCQLYYLLARKPRHAKRICT

SEQ ID NO: 282787 - protein, 155 aa, Glycine max
  Clone ID: PAT_MRT3847_9737C.1.pep
MAPAKADNAKKADPKAQALKTAKAVKSGGQVFKKKAKKIRTSVTFHRPRTLKKERNPKYPRISAPPRNKLDHYQILKFPLTTESAMKKIEDNNTLVFIVDLRADKKKIKDAVKKMYDIQAKKVNTLIRPDGTKKAYVRLTPDYDALDVANKIGII

SEQ ID NO: 282788 - protein, 82 aa, Glycine max
  Clone ID: PAT_MRT3847_97380C.1.pep
MQSFVKTLAGQTITLDVESSDTIDNVKANIQDKEGIPPDQQRLIFAGKHLEDCRTLDDYIIQTESTLHLVLRIRGGMQIFVK

SEQ ID NO: 282789 - protein, 47 aa, Glycine max
  Clone ID: PAT_MRT3847_97381C.1.pep
LLRLHPTFVLIIKIPCHLFLNVTNLMVLSKTLFFGVIKEEIRYLLVI

SEQ ID NO: 282790 - protein, 69 aa, Glycine max
  Clone ID: PAT_MRT3847_97382C.1.pep
YILLKKKNTKIKQGFKNTGSLFFKHSFFFLVLQVHLVLSAPLGCAWCCCSDGFLSRLFLWFIFFTTLLR

SEQ ID NO: 282791 - protein, 66 aa, Glycine max
  Clone ID: PAT_MRT3847_97383C.1.pep
ATRMIACQQRGITCSLPLLVVDFFFWIFVAKLCRIVKWMFCEDFVLFNPPSIHMRVGEAHLCQKKK

SEQ ID NO: 282792 - protein, 72 aa, Glycine max
  Clone ID: PAT_MRT3847_97384C.1.pep
HYYMIISSRCHQNNFLPKTCRLPNLWVCLSSISRTSNLPAQTLDIWADYPIASPKEMCGLSFIGKHNITGMS

SEQ ID NO: 282793 - protein, 166 aa, Glycine max
  Clone ID: PAT_MRT3847_97385C.1.pep
TRPVSEGRKVHTGHSSFVFLLPRRSLLHSRTRIDPTTTSSERGLMAAQLRYMMSHYFGTPPSKEVIQDLYYALRTKGGLTPKEEETLLACNLLPGVYFIVGSVLGTFAMLLGSHKGLKLLGRPPNSPLRSLTVYGYGFIVGKACANETWHQLPELLLDREEGRMKT

SEQ ID NO: 282794 - protein, 132 aa, Glycine max
  unsure (1)..(132): unsure at all Xaa locations
  Clone ID: PAT_MRT3847_97386C.1.pep
AQWGILSWVTTANGGTPCIDAFSQASADRADFHISSLVRALNSEHNYLRIQVDTLIGDMSSVDMATQTNLNDLVKVGESLLKKPVSKVNFKTGVYEPVKSYETNEEAFKGFAECLSXQKQFRKSQMSANANP

SEQ ID NO: 282795 - protein, 120 aa, Glycine max
  Clone ID: PAT_MRT3847_97387C.1.pep
DDTLIGDMSSVDMATEKNLNDLVKVGESLLKKPVSKVNLKTGVYEPVKSYETNEEALKGFAERLSKQKQFRKSQMSAKCKSLNVERITSCINHYQCNIMVDVIYILTRCHHHHPGFFILI

SEQ ID NO: 282796 - protein, 101 aa, Glycine max
  Clone ID: PAT_MRT3847_97388C.1.pep
GRGSDYVPLGISVWPIWGLLIGTLTHFGWKNFAAEKKFCQFVNFLIRKGKWGLLFKPQMLFSHNRIMPRGAKKRGRTIFFVRAGQYLKDRGFKKLTCWDPP

SEQ ID NO: 282797 - protein, 107 aa, Glycine max
  Clone ID: PAT_MRT3847_97389C.1.pep
MFGNIPKKSWLVITEHAKACVIDDYQLYSYHSQELQIGLLFNSIYILVGVTFDWQNYYSPDTLTPREKHLVEIVKQQAYKNVNNLELINDTKLKLFKSSCMSKSKRI

SEQ ID NO: 282798 - protein, 65 aa, Glycine max
  unsure (1)..(65): unsure at all Xaa locations
  Clone ID: PAT_MRT3847_9738C.1.pep
VHGGVQISELSKYTVRDLVFEDGKSLQDLSRVVSDACICLQXNDNAYDVISSDCGKRVNVLPTGN

SEQ ID NO: 282799 - protein, 68 aa, Glycine max
  Clone ID: PAT_MRT3847_97390C.1.pep
QSSRKKKKKKKKKKKKKKKKKKKKKKKKQKANKQQKHNLNRHTKKKLNGFSRVTYNLNNALWLPTSET

SEQ ID NO: 282800 - protein, 59 aa, Glycine max
  Clone ID: PAT_MRT3847_97391C.1.pep
LMSQPTRRERLFIDRQHGFFFFQPDRQQIIDFHQLPVLEKKQAAHPGWPDQARKMLDGG

SEQ ID NO: 282801 - protein, 135 aa, Glycine max
  Clone ID: PAT_MRT3847_97392C.1.pep
ESGYLTVEFFRKMHLEPEKNADQKNPNRSNPNPPVDSYTDNHLSKIGSNVNGYINMVLDTLKNSIPKAVVHCQVREAKRSLLNHFYVQVGKREKDQLGALLDEDPALMEKRAQLAKRLELYKQAMDDINSVAWNK

SEQ ID NO: 282802 - protein, 132 aa, Glycine max
  unsure (1)..(132): unsure at all Xaa locations
  Clone ID: PAT_MRT3847_97393C.1.pep
PDESLTQTRIPNIFLCITAELLHKAHVEETYVIXWTNXKEHIFVLPSDSAVMITEGPNLVKLDMKDQSLTVATMLMSKYKIKSHFYRVCPNXDVHYSYPYDGVNPETADARRLGGGQNYQSIGNNVIPMKLK

SEQ ID NO: 282803 - protein, 60 aa, Glycine max
  Clone ID: PAT_MRT3847_97394C.1.pep
PSLSPLRMHLAELVRCDMHCHESPYQVCTTFLLMRLSLRKRSPYGMYAFLIEAPGNWELA

SEQ ID NO: 282804 - protein, 113 aa, Glycine max
  unsure (1)..(113): unsure at all Xaa locations
  Clone ID: PAT_MRT3847_97395C.1.pep
NSVRDAAGDQKTHASARNGLKERHPNTDMAKGRADARXDDKAFPRGKDNPAEHEKKLKELRAQKGGPQSTKKGDAALERQALPQGLAARISKVEPPGRGKATEEPRKGPGEKD

SEQ ID NO: 282805 - protein, 305 aa, Glycine max
  Clone ID: PAT_MRT3847_97396C.1.pep
MAIWKTNKSLSLPLMAFTMATMFLMLLNRVNSADSLSFSFNNFSEDQEDLILQGDATTGASSENDKNVLQLTKLDDSGKPEFGSVGRVLYFAPVHLWKSSQLVSTFETTFTFKISSASPDSVPADGLAFFIASPDTTPGAGGQDLGLFPHLTSLKNSSSSHHRKVTRITGVKDLASEPVVAVEFDTFINTDIGDPEYQHIGIDINSITSVTTTKWDWQNGKTVTAQISYNSASKRLTVVASYPDSTPVSLYYDIDLFTILPEWVRVGFSASTGGAAEANTLLSWSFSSSLQTNQIQKEDMHGIVM

SEQ ID NO: 282806 - protein, 189 aa, Glycine max
  unsure (1)..(189): unsure at all Xaa locations
  Clone ID: PAT_MRT3847_97397C.1.pep
MAISSCSLSWISPCLSHKLNLPHTNCLPRNTATSSSNTVFCALETTPRGESFCQRRPLLLGIGALTANLQPTNLVFAQEKPDRYRAFLDYEDGYSYVYPIDWKEFDFRAHDSAFKDRYLQLQNVRVKFIPTEKKDIRELGPMEEVIYDLVKHIYAAQNQRPTIXYTFEYILTSPNYSSASFATIAIGNG

SEQ ID NO: 282807 - protein, 122 aa, Glycine max
  unsure (1)..(122): unsure at all Xaa locations
  Clone ID: PAT_MRT3847_97398C.1.pep
SRKFVRVKEAILLVFMCTIITIAGSDLASDRAGLYGLRSAVGGRTLVWNVTQTSPXSRTGVVCASGRAIMLCLTVMGLSGSHSCGLGMLTRTAYANFSFNALTGHIPDEYAGLKAIRNLYLQ

SEQ ID NO: 282808 - protein, 41 aa, Glycine max
  unsure (1)..(41): unsure at all Xaa locations
  Clone ID: PAT_MRT3847_97399C.1.pep
MKFITLASKPDSCQSEGDNIRYVAAEXASDISVKGGNVKFN

SEQ ID NO: 282809 - protein, 36 aa, Glycine max
  Clone ID: PAT_MRT3847_9739C.1.pep
RVDDRKGLLLVLKPRYRSRVYFPFLFRFDKFASSRN

SEQ ID NO: 282810 - protein, 110 aa, Glycine max
  unsure (1)..(110): unsure at all Xaa locations
  Clone ID: PAT_MRT3847_973C.1.pep
XSXARVRKLGIRLEHNSLXXWVXXXXXXXGXVPXVAXRXXXGXXEXMXVXRQXWRXTXDCRXNNYSPGGCRXRXXNGRSGSALMIXXLGNXLLRRSXELVXXRRVLRYXX

SEQ ID NO: 282811 - protein, 69 aa, Glycine max
  unsure (1)..(69): unsure at all Xaa locations
  Clone ID: PAT_MRT3847_97400C.1.pep
NGLKGIPSGGYDPIEAVEFRSPNGPTTVDSSXASVMAIPIVKAVARYSNEWGNPQRVVDLAEIVPNKWK

SEQ ID NO: 282812 - protein, 54 aa, Glycine max
  Clone ID: PAT_MRT3847_97401C.1.pep
ESNANSFALTPDFLPPCRSSVANTSIVNVEESLCTIPLTENKFCCASRKVKRIQ

SEQ ID NO: 282813 - protein, 170 aa, Glycine max
  Clone ID: PAT_MRT3847_97402C.1.pep
QARIGSRTSKSLDTLSQRNTTTKWTTLPIIGHLHPVGSVIPKSFQALARLYGPLIQLRLGASTCVVGSNDQVAKEVMKTNDLNFCYRPHFGSSEYFLYKGSDFITAPYGPYWRFIKKLCMTQLLSSSQLGRFVHRSRARNYKLLKSVLVCSSEGKGIDLSFELTSLTNNI

SEQ ID NO: 282814 - protein, 82 aa, Glycine max
  Clone ID: PAT_MRT3847_97403C.1.pep
DRLTDHQISVSKEPFGLLHKDGDGCITSNELVSDMRPLGHNPTEADLLDTIIELDADVNATIDFPEFLRLVATKINDTHSGE

SEQ ID NO: 282815 - protein, 33 aa, Glycine max
  Clone ID: PAT_MRT3847_97404C.1.pep
SLKVSVFLLDHTYLLHLRYFSKFSLKIGTHVLI

SEQ ID NO: 282816 - protein, 49 aa, Glycine max
  Clone ID: PAT_MRT3847_97405C.1.pep
TSSPLLLLKPWYETQNHVQTQPKFQTMIFPNFLFVMKVSLLNQTSIWGV

SEQ ID NO: 282817 - protein, 78 aa, Glycine max
  unsure (1)..(78): unsure at all Xaa locations
  Clone ID: PAT_MRT3847_97406C.1.pep
XVQDIARXLKLXDNELLXTEXKFXVFMEXYGSXDSXEEEYXXXXGIXAQNMVRSXXXQXLGPXAASTXSTQXXXLTDD

SEQ ID NO: 282818 - protein, 75 aa, Glycine max
  Clone ID: PAT_MRT3847_97407C.1.pep
VGNYDGCPVQAPAFIHMMRNSHTVKVLHGEINIYIYIYIYIYIYIYIYTFLNFFKCVHIYVAWIGIERIFFTDLI

SEQ ID NO: 282819 - protein, 46 aa, Glycine max
  Clone ID: PAT_MRT3847_97408C.1.pep
IYNFYNHTYQLGSGFITIHHIYHTKFKKYTLPNTNDYIPKLNIYIM

SEQ ID NO: 282820 - protein, 105 aa, Glycine max
  Clone ID: PAT_MRT3847_97409C.1.pep
NKISVKNNQRRTLKFSIQIHNIKHRCEKTSAEINNIRLLPILGMIQKFKPLFSEANSFLLRFWLLQECLLQPSPWLNEVESASGGGNAPQGGGFDVGGLETEPRW

SEQ ID NO: 282821 - protein, 212 aa, Glycine max
  Clone ID: PAT_MRT3847_9740C.1.pep
MSSGATHWCHACRQPVVLDGRDAVCPYCDGGFVQELDELEGIAPHHTFCSQSGEFHQMPDIFDAIPAFMGQRGSDQRSRLMDDAVDNFMRHRTAGRNSNFDVRGRSGSRPVPERSWGVFSSGPYLIFHGQVPGSTFAAGSPRGGSRHVDFGDYFMGLGLEELIEQLTMNDRRGPPPGALSSIDAMPTIKITQAHLRLDSHCPVCKRKFELGT

SEQ ID NO: 282822 - protein, 53 aa, Glycine max
  Clone ID: PAT_MRT3847_97410C.1.pep
GVSRRGSIRVIIVITSGLLGLEVVDLTPKFDVKVDPFYLASRRCNCCSKSACL

SEQ ID NO: 282823 - protein, 61 aa, Glycine max
  Clone ID: PAT_MRT3847_97411C.1.pep
PYLVYVSDGTDTPDFTSAVYVSPFPLTPSAGNKSKYALALSAGSTGATYGINGVVNPPRER

SEQ ID NO: 282824 - protein, 162 aa, Glycine max
  Clone ID: PAT_MRT3847_97412C.1.pep
APDLRLEYVVAIEGVVRSRPDESINKKMQTGFIEVAANKVQLLNSVNSKLPFLVTTADDAKDSLKEEIRLRYRCLDLRRQQMNFNILLRHKVVKLIRRYLEDVHGFVEIETPILSRSTPEGARDYLVPSRIQPGTFYALPQSPQLFKQMLMVAGFDKYYQIA

SEQ ID NO: 282825 - protein, 49 aa, Glycine max
  Clone ID: PAT_MRT3847_97413C.1.pep
SLRGVSFKFFHIKPKIVLPVVGNVKFFLYNLNEKQFILVNKKGPNLIPV

SEQ ID NO: 282826 - protein, 52 aa, Glycine max
  Clone ID: PAT_MRT3847_97414C.1.pep
RNRLSVFFLLVFTLLSASLHHFGYLLLIFSICSPNQLVALGFVWGLLCFFPS

SEQ ID NO: 282827 - protein, 133 aa, Glycine max
  unsure (1)..(133): unsure at all Xaa locations
  Clone ID: PAT_MRT3847_97415C.1.pep
CLGDLCGALHCDAVMNFKSSRSKCNPAAAARNRHLCENLADNCFPISEGPSAGRLHELFLHQFCDAHTCSGNHKPFSRGAKXKVVSSXLAAGALILXLLPVFYLFLYLVQSDVKSRTQELRRISKAGWKSKPS

SEQ ID NO: 282828 - protein, 65 aa, Glycine max
  Clone ID: PAT_MRT3847_97416C.1.pep
LLILWCLRTILLQYQSRWCYLVTSSNKYNGGSGGSLAWGSLPGNGSRLLRKRLLEYKCEAKSYIM

SEQ ID NO: 282829 - protein, 233 aa, Glycine max
  Clone ID: PAT_MRT3847_97417C.1.pep
LDPPPWLNRMRELGYPPGYLDVDDEDQPSGITIYTDREIADQEDGEIMEADASKPKRKKTVKFPGINAPIPEKADERLWGTRAGPSSSDISRNLSLPQHRSNYSTDYGSRGYHREHRLGDLRDDGPPGDPGHSSFKFSFHPRFGGHDSALRSPSMARSQSDRSRSPMHDEESSMPFSFHSLHYSSSERHFSPLDPDSGRPGSRTSESMYYDRDRDLSSRVKDRPDDRHHRSWR

SEQ ID NO: 282830 - protein, 76 aa, Glycine max
  Clone ID: PAT_MRT3847_97418C.1.pep
SYTTILLGCLTHFLLAMLTHFNSNALSYLFIHFILISPLSSQVPSEVHSLSFLPPFFPHFTTPTLHSSVKTLDFQI

SEQ ID NO: 282831 - protein, 63 aa, Glycine max
  Clone ID: PAT_MRT3847_97419C.1.pep
LSIHFVSLFLLNWQVFWGLDKKLAQRKHFPSVNWLISYSKYSTVSLETFYEQFDPDFINIRTK

SEQ ID NO: 282832 - protein, 76 aa, Glycine max
  Clone ID: PAT_MRT3847_9741C.1.pep
MNHSSNNQQETPLSYLPEGQANSSAPYVTAPPPMGYPSKNGSIEQRVPEETTSRGDGFWKGCCAALCCCCVLDCVF

SEQ ID NO: 282833 - protein, 109 aa, Glycine max
  Clone ID: PAT_MRT3847_97420C.1.pep
KTLSALGWLVFPPFLGVYNFLSRRVSLFLFVLGANRLKVLVPPLWPPRFSGFELRVSCFEVLWGFNRFPLFPRVPHFLVVLQPFDISRKLEGRLGPAFMSRVYPWSPQF

SEQ ID NO: 282834 - protein, 60 aa, Glycine max
  Clone ID: PAT_MRT3847_97421C.1.pep
QVAMVLLDGGIIVAKTVDWTALIQDSPIRNLVTDADWRTGCLTMDLEMTLNAKVQRGDGA

SEQ ID NO: 282835 - protein, 58 aa, Glycine max
  Clone ID: PAT_MRT3847_97422C.1.pep
SQTSLFLLLLLGLITTILVADLMGICHGKPIETQQSQRETNTPSEFPSELQTPTKTPK

SEQ ID NO: 282836 - protein, 53 aa, Glycine max
  Clone ID: PAT_MRT3847_97423C.1.pep
LASSWARSSVWVSVFGPVFGSWVPLACDSLLCSLGCSPFVGVLCSVPLLGSLV

SEQ ID NO: 282837 - protein, 66 aa, Glycine max
  Clone ID: PAT_MRT3847_97424C.1.pep
GPLATQNLNLFDSGLGTVDLRSFTVQSKSTFSLVDGGRSFGNAVRFTLYQDLRVLFCGYSITHSSD

SEQ ID NO: 282838 - protein, 195 aa, Glycine max
  Clone ID: PAT_MRT3847_97425C.1.pep
MAKEGLGLEITELRLGLPDAEHQVSVVNKKNEKKRAFSEIDDGVGDENSSSGGGDRKMETNKSQVVGWPPVCSYRKKNSMNEGASKMYVKVSMDGAPFLRKIDLGLHKGYSDLALALDKLFGCYGMVEALKNADNSEHVPIYEDKDGDWMLVGDVPWEMFMESCKRLRIMKKSDAKGFGLQPKGSLKGFIESAAK

SEQ ID NO: 282839 - protein, 187 aa, Glycine max
  Clone ID: PAT_MRT3847_97426C.1.pep
MAKEGLGLEITELRLGLPDAEHVTVVNKNEKKRAFSQIDDENSSSGGDRKIKTNKSQVVGWPPVCSYRKKNSMNEGSKMYVKVSMDGAPFLRKIDLGLHKGYSDLALALDKLFGSYGMVEALKNADNSEHVPIYEDKDGDWMLVGDVPWEMFMESCKRLRIMKRSDAKGFGLQPKGSLKGFIESAAK

SEQ ID NO: 282840 - protein, 93 aa, Glycine max
  Clone ID: PAT_MRT3847_97427C.1.pep
TKKGTHKGWPFKSFPFGAPPKKGVAKPIFSGIDFFRSGSPLNMEIFPPFCFVGLLSTLVGLPTIFFGEFLAGKKSSGCFFKWLAKFSAYYRGE

SEQ ID NO: 282841 - protein, 138 aa, Glycine max
  Clone ID: PAT_MRT3847_97428C.1.pep
RAAGIRHQPSPSPPPPYYYKSPPPPEKSPAPTPYYYKSPPPPSPSPPPPYYYKSPPPPSPSPPPPYYYKSPPPPSPSSPPPYYYKSPPPPEKSPAPTPYYYKSPPPPSPSPPPPYYYKSPPPPSPSPPPPYYYKSPPP

SEQ ID NO: 282842 - protein, 204 aa, Glycine max
  Clone ID: PAT_MRT3847_97429C.1.pep
MEKGGISINCFSLEGQLAKLELIGLGTFQLLQKVLHAVGSISENYWQLKKHVPIEEESVSQNQNSSILKSEDYFSSCAMLSLNVKDPRELPWKKTVVPLESLSTKTPSDAQETKYKELAELGGILEENKDLSSLSRSKLEDSQFDIDDLWYATTRGLRPPVEDNVLSKEKYHERMVNFFLDDIDSGEINSSTKVQCSRSSPILL

SEQ ID NO: 282843 - protein, 59 aa, Glycine max
  Clone ID: PAT_MRT3847_9742C.1.pep
MICYHGVRNYFSIAKIVCLKGKQKDYKPLGLIFKVPISFCSIYLNEKSFKVWPLKLLFN

SEQ ID NO: 282844 - protein, 136 aa, Glycine max
  unsure (1)..(136): unsure at all Xaa locations
  Clone ID: PAT_MRT3847_97430C.1.pep
ASSMISSPAXYTTANRAGAGVDAPFTGLKSXAGCPTRKTSYDITLLGSSGEISAMSCRCGHHVDKRKFETASYLPDLDDAQLAEEVDDQLRKGWIPRPXLEMEHGFWVREHNRIPSDHEGPLENLTRRALYGCPNS

SEQ ID NO: 282845 - protein, 95 aa, Glycine max
  Clone ID: PAT_MRT3847_97431C.1.pep
GGYWVSPRQPLGFPNLKLICKMPKEKAQTTLGGGGHGAPGGAPPLYEFKKPVVEKKAPGHPILGHARPASGGTPKILFPKYFGPPRDRGPPQGVV

SEQ ID NO: 282846 - protein, 63 aa, Glycine max
  Clone ID: PAT_MRT3847_97432C.1.pep
RSRMVSWGMKRATLRSSYQCHIGLNQLTSIQGQVAKRTILRCKAIDLCVLTLPWYVRDSTNYG

SEQ ID NO: 282847 - protein, 51 aa, Glycine max
  Clone ID: PAT_MRT3847_97433C.1.pep
SIHTSARTFNENQFYSSMISYTTHAYVYTCLGAEWMLHILASSSSMASAIK

SEQ ID NO: 282848 - protein, 152 aa, Glycine max
  Clone ID: PAT_MRT3847_97434C.1.pep
MGRGKIEIKKIENLNSRQVTFSKRRNGLLKKAKELSVLCDAEVAVIIFSSTGKLYEFSNTSMEHTLSRYSKGAESDSAEQPIDVPPTDVMAVEPDTNLLMEEITKLRSAYLRMMGKELDGLSLKELQQLENQLSEGMQSVKDKKEQVLVEQL

SEQ ID NO: 282849 - protein, 76 aa, Glycine max
  Clone ID: PAT_MRT3847_97435C.1.pep
RIKFRPLTSIYTNLQKLLTSNGLKTKLTHKLEGHKNTLSKEYPPHPDLGVFNCVPRRPGGQRSTLKGPTDLKGAAR

SEQ ID NO: 282850 - protein, 95 aa, Glycine max
  Clone ID: PAT_MRT3847_97436C.1.pep
VSVMCDCDTPSNSDSISFGISIGLSNNTNEINSYMIISASRSRGNVELEFRKRADGHILWVQDRPNKKTYTSNSYMDILASQCLTNVVLGCSQST

SEQ ID NO: 282851 - protein, 68 aa, Glycine max
  Clone ID: PAT_MRT3847_97437C.1.pep
THTLRARCSFLVSTSSAPLQLSHTLYMTHYILCLFPCISILASFLLEGMCRTVIERERERERERERDW

SEQ ID NO: 282852 - protein, 57 aa, Glycine max
  Clone ID: PAT_MRT3847_97438C.1.pep
HSPIAPSEMPPLQKPQCASEGIELQHAVGNSLPCIRQVVCDCNAQYCACIICSLDSD

SEQ ID NO: 282853 - protein, 169 aa, Glycine max
  Clone ID: PAT_MRT3847_97439C.1.pep
VDSESENSRNKVQQHQQHHGFAHANKEHPQEKKPSFDEFRSTTPSKFATSGMQELTLSYLCENPKLGLAEREVGDRSLVKGKEVVVYGNSDQDEKCQSGLGLTEGVSLSQRDELRFKTSLGEVSPFSVQQYFEQNCLRRKISVGNQNQKQDQDEKWVEREFLSLSETRE

SEQ ID NO: 282854 - protein, 68 aa, Glycine max
  Clone ID: PAT_MRT3847_9743C.1.pep
SFERSVCLTTMSSCLPTVMMVSRCSPFGLLSVDHLPSYHVHVLSSSQDFILSKEIIVQNSPSEGIPAS

SEQ ID NO: 282855 - protein, 50 aa, Glycine max
  Clone ID: PAT_MRT3847_97440C.1.pep
PKSQSLHTNPMILLIGRQYPVRLFLQLKQPNLDQQTGKDWQPDPFCYPLC

SEQ ID NO: 282856 - protein, 78 aa, Glycine max
  Clone ID: PAT_MRT3847_97441C.1.pep
LSTEFSWPLIHFDEKCTIPPSQHSARGRIGPHILPGPFHRFVSGREHKGIFFCSLSYFSGRALFSVHPAAIAPRYGPS

SEQ ID NO: 282857 - protein, 116 aa, Glycine max
  unsure (1)..(116): unsure at all Xaa locations
  Clone ID: PAT_MRT3847_97442C.1.pep
DPLYSILQNSCTAFRKHTYIARRNQTARKSTRXKAPMKQLATNAARKSAPTTGDVNKPHRYRPDTVALREIRTYQNSTELLIRKLLFQKLVREIAQDFKTDLRFQSHALLAMQETA

SEQ ID NO: 282858 - protein, 75 aa, Glycine max
  unsure (1)..(75): unsure at all Xaa locations
  Clone ID: PAT_MRT3847_97443C.1.pep
QFDRSASFLYPNGVFKKSNANALPRSSSSRARSLTDPLLXPYQLFNQGVYVYDLETNHCCLCSLGLVLVHVFCYK

SEQ ID NO: 282859 - protein, 58 aa, Glycine max
  unsure (1)..(58): unsure at all Xaa locations
  Clone ID: PAT_MRT3847_97444C.1.pep
NKLTSILSDFPLXKTSLLFNNYKFSPHXPTYQQIKTQPYPSFTXHPNYNSQIILKLIY

SEQ ID NO: 282860 - protein, 85 aa, Glycine max
  unsure (1)..(85): unsure at all Xaa locations
  Clone ID: PAT_MRT3847_97445C.1.pep
APRLGSSKPLKVKQFRFLTRKETKLGSIYEIQXHLXHXKRATKNRINYRQCEASQSETYLIKSDKSNSSTDHSNPIENGEYIIES

SEQ ID NO: 282861 - protein, 130 aa, Glycine max
  unsure (1)..(130): unsure at all Xaa locations
  Clone ID: PAT_MRT3847_97446C.1.pep
LFFSLVVSGFLCCRCLALLCPVAGVVSFLAFVPCRCLFPFCLAFGGFLSAXGLVSPPPLALPAVLRAGAPVFFPWVLRAPVLXRLPPVGVWGSLLLPPPFWVPVSVPSGGVGLGXPGGSGPVPAGASPFP

SEQ ID NO: 282862 - protein, 100 aa, Glycine max
  Clone ID: PAT_MRT3847_97447C.1.pep
MQIFVKTLTGKTITLEVESSDTIDNVKSKIQDKEGIPPDQQRLIFAGKQLEDGRTLSDYNIQKESTLHLVLRLRGGMQIFVKTLTGKTITLEVESSHSTT

SEQ ID NO: 282863 - protein, 76 aa, Glycine max
  unsure (1)..(76): unsure at all Xaa locations
  Clone ID: PAT_MRT3847_97448C.1.pep
RERERQKEETTKHAHXPAHXAAARRDHAAXRXRXTTNXRXAKAGEDNTEAETHAAEHKADEXTAENERRDXPGRET

SEQ ID NO: 282864 - protein, 120 aa, Glycine max
  unsure (1)..(120): unsure at all Xaa locations
  Clone ID: PAT_MRT3847_97449C.1.pep
ADNGLCTENLLTLVAEAVKKSGVLDRLLDVQKLDNVDIEGAIHKIEDINQXECIIGRDXSEVQMKKYTSLQSASMDEKLRIEKDYLIAATTKESRHMISFGAGKGRDYGYGSFCNNIYVE

SEQ ID NO: 282865 - protein, 57 aa, Glycine max
  Clone ID: PAT_MRT3847_9744C.1.pep
KEGPRTQETSHHTFYIGVTEDKTKNNGGFLCVMSVLVPTIVLFTKSLHLSVADHLKL

SEQ ID NO: 282866 - protein, 31 aa, Glycine max
  Clone ID: PAT_MRT3847_97450C.1.pep
GHSPIYLLALSCVQFQGVILLNHLTYKHYSF

SEQ ID NO: 282867 - protein, 82 aa, Glycine max
  Clone ID: PAT_MRT3847_97451C.1.pep
RSILFASTRQVDLRIIHVPGSKGFCMRGNFWNIIYRIIHVVHLSCVNSSFCPSCIIAVSKLGMIFCGRKFNLRNLNASCSEK

SEQ ID NO: 282868 - protein, 96 aa, Glycine max
  Clone ID: PAT_MRT3847_97452C.1.pep
KYVQKLAKRSTCAYVVPDELGILLNSLKRMLDSLRPRIESQFKTWGSCLPHVGNTTPGERLSEVTVMLRAKFRNYVQAIVEKLAENVSSLWKANLL

SEQ ID NO: 282869 - protein, 54 aa, Glycine max
  Clone ID: PAT_MRT3847_97453C.1.pep
YSDPILSSLSMLHLMRKEIGVVYQEDILHTLHCSPLCLEDLSSCSSHVTTFRHV

SEQ ID NO: 282870 - protein, 67 aa, Glycine max
  Clone ID: PAT_MRT3847_97454C.1.pep
SKTTDTYMIYAYKQNCFFFINIFPCFKIFFNINFVFRPALFLINKVVLISLRSIFYIFTRSLVSLTP

SEQ ID NO: 282871 - protein, 102 aa, Glycine max
  Clone ID: PAT_MRT3847_97455C.1.pep
MELVNSQKLKQHEQQQHFHVLVVDDSVIDRKLLERLLRDSSCKATFVDSGDKALKFLGLLDDDLDNSSSTSSESLQLNGIKVNMIMTDYCMPGMSGYDLLKR

SEQ ID NO: 282872 - protein, 64 aa, Glycine max
  Clone ID: PAT_MRT3847_97456C.1.pep
SPQNPLAFFFFLKKRGINGCFTTLTYGFLYPYIYPYHENFFNGPPKKKKNLTPLEKNPFFNGFF

SEQ ID NO: 282873 - protein, 43 aa, Glycine max
  Clone ID: PAT_MRT3847_97457C.1.pep
GGATAENVSVIALVSICVSLRLLSNFFLLAMIQQKGRGRGDEI

SEQ ID NO: 282874 - protein, 63 aa, Glycine max
  Clone ID: PAT_MRT3847_97458C.1.pep
NSIFPNFLIGKKKVFLKHPFKKVFFFAPVFPPLVEKKQGGKKPFFADYGEAPQKLSKLGFFKP

SEQ ID NO: 282875 - protein, 35 aa, Glycine max
  Clone ID: PAT_MRT3847_97459C.1.pep
NNILMILSYTLTLIHDKLVTNLGDNYFPNEVTLCK

SEQ ID NO: 282876 - protein, 111 aa, Glycine max
  Clone ID: PAT_MRT3847_9745C.1.pep
RPFFFGWFFFLIPSFSPQDFFGFFFWGPKISAFFWGYFPAPFFKPLHYSGDTVFIFLHKLLPLSISSKNMKRHCAAVRPFAKNFFKDNNVFFLRACMMPKALHLDWGPQEG

SEQ ID NO: 282877 - protein, 249 aa, Glycine max
  Clone ID: PAT_MRT3847_97460C.1.pep
MDHQFSHIIPTERSPRRELQLQGPRPTPLRINKDSHKIKKPPLAPQPSHPHQPPPRQPIIIYTVSPKVIHTTPSDFMNLVQRLTGSSSSSSAEVVMSNNNNTTHVDPFNNGGGGMVSPAARYATIEKAMSPMGKKHVLLPSVNNIISDVEGIEISIGDGVLERSQQNMFQGILSPGPASLSPIPSNFFSPPSSSDPSMISFLRDLSPMFQSGRNFTEGGSSFVLPSPSSNFSFVSPHTPSIDLFNYFLD

SEQ ID NO: 282878 - protein, 99 aa, Glycine max
  unsure (1)..(99): unsure at all Xaa locations
  Clone ID: PAT_MRT3847_97461C.1.pep
EKSRDTVNPNEFNWIAGKILKXFYDRDLRSDIIESDLCGALFPGEFSISDIVKHWIEIFSGFDKGEAKALEKILEQKQRLQQEMQKYLSLMKMSQDKRY

SEQ ID NO: 282879 - protein, 65 aa, Glycine max
  unsure (1)..(65): unsure at all Xaa locations
  Clone ID: PAT_MRT3847_97462C.1.pep
SLKSLIMLGQHNDTNLWLNGVLCHLVKRWRVRFSSQSYMCKKVIEYPVLYETFVVPKKKKKKKNX

SEQ ID NO: 282880 - protein, 125 aa, Glycine max
  unsure (1)..(125): unsure at all Xaa locations
  Clone ID: PAT_MRT3847_97463C.1.pep
VAHDMGEEWLDCADEEDSFEEESLSASLNGGEGLDYMERIPLATSDGFPDELSRTNGEKGKTRFVSGDGEEMTLISGTSVEKAHNKLMVELEKSVPTXAGIVCPMDXEKLADCKIFDIPKTRCFT

SEQ ID NO: 282881 - protein, 63 aa, Glycine max
  Clone ID: PAT_MRT3847_97464C.1.pep
RRFLLQWLLPCLLLLPLQLQLEQHLRALCSRALDLYRTQKDRPFFLVDIPRGLRTRVFTTPLV

SEQ ID NO: 282882 - protein, 52 aa, Glycine max
  Clone ID: PAT_MRT3847_97465C.1.pep
SLIKHIAVYIYTDRYSISCILIKIRPLPITCYRLLYFLELIHSFSNEPDNPK

SEQ ID NO: 282883 - protein, 82 aa, Glycine max
  Clone ID: PAT_MRT3847_97466C.1.pep
TREDVGTCGPLRSGVHHGVTPCTALGTETACSSIGGQGSIMSCKNGACYGGACITHGAPMRVDSDTEHALHRRWGAGQANSG

SEQ ID NO: 282884 - protein, 314 aa, Glycine max
  Clone ID: PAT_MRT3847_97467C.1.pep
QILTASGDQTIKVWDVQEQKCLGLLTGHTGSVKSMCSHPTNSDIIVSGSRDGSFRIWDLRCKSTAKSRCGEVSICSMGGVKGAHISSQARRTRRGRAASMSITSVLCLKDQVSIATAGAVDSVLKFWDTRNLKSTVTQTSPSPQSTEKQTLHGISSLSQDEIRLRQDDRRMDNRIYLYNTLQLEKGPLKSFSGCRIESFFVKSAISPDASNIVSGSSDGNAYVWKVDKPLEDPTILKGHDGEVTAVDWCSSEIGKLATCSDDFTVRTWNKNSYVFSTQCASAILRRVMAIPSIECKMLLNNGKTYSKTNEDAFL

SEQ ID NO: 282885 - protein, 67 aa, Glycine max
  Clone ID: PAT_MRT3847_97468C.1.pep
LLLSVRGLKATSITLWAGRLLNEADPHPLLVYLLNTILLDIGLGVTRELLLSESEISVYNQDQAGEN

SEQ ID NO: 282886 - protein, 41 aa, Glycine max
  Clone ID: PAT_MRT3847_97469C.1.pep
QGGCLTRCVRMDEVTKRFNKWDMRQVPNKVPVNYVSYVLIS

SEQ ID NO: 282887 - protein, 95 aa, Glycine max
  Clone ID: PAT_MRT3847_9746C.1.pep
NQKKKKKKKKKKLGGGPGPRGPPENTRAKPAGVPSFPKGRRIKAWGKPGQNGSPGKNVIPPQFHTKNNPKTKSGKPGAPKENTKPTLWGGPPRPP

SEQ ID NO: 282888 - protein, 123 aa, Glycine max
  Clone ID: PAT_MRT3847_97470C.1.pep
MKFGKSLSSQIEKTLPEWRDKFLSYKELKKKLKQFDPPAAADERPGKRLKSDAVPDAADMSKEESDFRNLLENELDKFNTFFVEKEEEYIIRLKELQDRVAKVKDSSEEMMKIHTEIVDFHGE

SEQ ID NO: 282889 - protein, 54 aa, Glycine max
  Clone ID: PAT_MRT3847_97471C.1.pep
GQRARKIFRPTKALGVRSLLRNMVCGPSYHNIEKLHLYAGMDIYNIGKQTIQKT

SEQ ID NO: 282890 - protein, 295 aa, Glycine max
  unsure (1)..(295): unsure at all Xaa locations
  Clone ID: PAT_MRT3847_97472C.1.pep
MKFGKSLSSQIEKTLPEWRDKFLSYKELKKKLKQFDPPAPASAADERPGKRLKTDAGNADADAVSDASDMSKEESDFRNLLENELDKFNTFFVEKEEEYIIRLKELQDSVAQVKGSREEMMKIHKEIVDFHGEMVLLENYSALNYTGLVKILKKYDKRTGALIRLPFIQKXLQHPFFTTDLLYKESLECETMLDHLFPVNDPAPVSTETTPQAEGFDPSTSTTTKCDGLVIPKELAEIEYMESLYMKSTVSALHVLQEIRSGSSTVSMFSLPPLKISGSEEETWKKIPVLEQAAK

SEQ ID NO: 282891 - protein, 198 aa, Glycine max
  unsure (1)..(198): unsure at all Xaa locations
  Clone ID: PAT_MRT3847_97473C.1.pep
GGGGEEGATLEFTPTWVVAAFCTVIVAISLAAERLLHYGGKFLKAKDQKPLYEALQKIKEANHESHFQTFFPGTARRLLSGEHSTPESASKIGYCSRKHKVPLLSVEALHHLHIFIFVLAVVHVSFSVLTVVFGGARIRQWKHWEDSIAKQNYETDRVLKPKVTQVHQHDFIRGXFAGFGKDSAIVGWLLSFLKQFYG

SEQ ID NO: 282892 - protein, 208 aa, Glycine max
  unsure (1)..(208): unsure at all Xaa locations
  Clone ID: PAT_MRT3847_97474C.1.pep
NKVPLLSLEALHHLHIFIFVLAVVHVSFSLLTVVFGGARIRQWKHWEDSIAKQNYETGRVLKPKVTQVHQHDFIRGRFAGFDKDSAIVGWLLSFLKQFYGSVTKSDYVTLRHGFIMTHCRTNPKFNFHKYMIRALEDDFKQVVGISWYLWLFVVIFLLLNINXLLAVGTKLGHVITQLAQEVAEKHAAIEGDLVVQPSDEHFWFHRPH

SEQ ID NO: 282893 - protein, 324 aa, Glycine max
  unsure (1)..(324): unsure at all Xaa locations
  Clone ID: PAT_MRT3847_97475C.1.pep
SEIRARRESFSKPRTRSRSTKLSRRSKKVSFSFFLCTEPSNQIHDLLAALAELMLLGFISLLLTVTQNGITKICVRPSLTRHMLPCNLDAGEHSTPESESATKIGYCVRKVTPSHSLTFLFLRSHLIHHPSXRLLFCFSLFQNKVPLLSLEALHHLHIFIFVLAVVHVSFSLLTVVFGGARIRQWKHWEDSIAKQNYETGRVLKPKVTQVHQHDFIRGRFAGFDKDSAIVGWLLSFLKQFYGSVTKSDYVTLRHGFIMTHCRTNPKFNFHKYMIRALEDDFKQVVGISWYLWLFVVIFLLLNINGMLQDRKLCFYACHHLIGST

SEQ ID NO: 282894 - protein, 290 aa, Glycine max
  unsure (1)..(290): unsure at all Xaa locations
  Clone ID: PAT_MRT3847_97476C.1.pep
ALLKLHQIDDAESCISWIPKSKPHPGSLSQARFFGMFSEAYCFFVRAQIEMAFGRFENAVTTAEKASQIDPRTVEVAVLLNNVRMVARARLRGNDLFKSERFTEACSAYGEGXLRLDPSXSVLYCNRAAXCWFKLXQWXERSIEDCNQALHIQPDYTKAILRRAASNSKXKXRPRGEEVYNLKFGGEVEEVSGLEQFRAAISLPGVSVVHFEVASNLQCKQIWPFVNTLCGRYPSINFLKVDIQQSPTVATAENVRIVPTFKIYKNGSRVKEIVCPSRDMLEHSVRHYSF

SEQ ID NO: 282895 - protein, 544 aa, Glycine max
  unsure (1)..(544): unsure at all Xaa locations
  Clone ID: PAT_MRT3847_97477C.1.pep
MSGGGGGEEEATLEFTPTWVVAAVCTVIVAISLAAERLLHYGGKFLKAKDQKSLYEALQKIKEELMLLGFISLLLTVTQNGITKICVRPSLTRHMLPCNLDAGEHSTPESESATKIGYCVRKNKVPLLSLEALHHLHIFIFVLAVVHVSFSLLTVVFGGARIRQWKHWEDFIAKQNYETGPAVASLQGTFIIFGSTSPSSHLHFCPRCRTRLLFLTHRCLRRRQNTLRSHSLAPLSLRPLYNLPLPVLPAAFYFPVSGNTGKIQLLNRTTKLTRVXNLHQHDFIRGRFAGFDKDSAIVGSALAGWLLSFLKQFYGSVTKSDYVTLRHGFIMTHCRTNPKFNFHKYMIRALEDDFKQVVGISWYLWLFVVIFLXLAHRVAEKHAXLVRQPSDEHFRFHRPHVVLFLIHFILFQNAFEIAFFFWIWVTYGFDSCIMGQVRYIVPRLVIGVFIQVLCSYSTLPLYAIVTQMGTHYKRAIFNEHLQQNIVGWAQKAKKRKGLKADGNPGQGSSQESANTGIQLGSIFKKASAPGGSSSATKADGTNSV

SEQ ID NO: 282896 - protein, 110 aa, Glycine max
  Clone ID: PAT_MRT3847_97478C.1.pep
FPHPLRPPLIGKPRPPPGTPPETPGRPPPPRRRGGTRRPPGPLRNNAETCSLFQTFRIFWFSLCCPPVFWVYPNPLKIKWSFSPLDQVQVFSPPPAGVKARDPFFSTNNL

SEQ ID NO: 282897 - protein, 67 aa, Glycine max
  Clone ID: PAT_MRT3847_97479C.1.pep
FLSTMTWHIRWGSTMWATVLINIYRKGSLQFHPPFSSRPLFSHFLPQDIKSTPFPKTLIQESLLTLQ

SEQ ID NO: 282898 - protein, 56 aa, Glycine max
  Clone ID: PAT_MRT3847_9747C.1.pep
READFGKNKVMMFTGWYKDKYNNTTLTRPVLPYRDDEHHTTFKFHFSSSKHEYTYS

SEQ ID NO: 282899 - protein, 39 aa, Glycine max
  Clone ID: PAT_MRT3847_97480C.1.pep
PLNFGFSFFFFFPGSQIWFYYRAFPSLTKDSTDYHFNHF

SEQ ID NO: 282900 - protein, 84 aa, Glycine max
  Clone ID: PAT_MRT3847_97481C.1.pep
FHARYGPIGLARGRVSRLNHFIQVVRRYSANLSISVHSVAHYGVCEASVYMHVHGAPHGGPLRAVAKKENRPRTCSYWSQRFHG

SEQ ID NO: 282901 - protein, 102 aa, Glycine max
  unsure (1)..(102): unsure at all Xaa locations
  Clone ID: PAT_MRT3847_97482C.1.pep
QGPQADKKQDEKILPHTEQGKREGATRGTGGKRXGNKGHNKEPTSGPKAKEDRXKAQEETRGPAKAPKKXKTREESXXQGQTTPEEGQNTGEGTKSRDTTNT

SEQ ID NO: 282902 - protein, 165 aa, Glycine max
  Clone ID: PAT_MRT3847_97483C.1.pep
MYILNGDCATFIFCYLDWMSLTSFYFLLTYLISPFWLASACRQVLLTSEIMVCIGLLLSFHIMIPYSVTQYVGSALITFVSAEVLEGVNLSLLSKMMSSRLSRGTFNGGLLSTEAGTLARVIADGTITISGYFSESKLLNTTLLPALLICISSIIATCYSYNSLY

SEQ ID NO: 282903 - protein, 268 aa, Glycine max
  Clone ID: PAT_MRT3847_97484C.1.pep
LEPNRLEFLLKIAFHEDEEFESQCAKEIQRRKEVEEQLAREKQEVQKMKNQRDEILEELQMVQDQNSALMNQISESQCTETELEEKIISAVDLLISFREQRDRLRIEHANAVREVKVLRKIGEADTSFSYRVEFPAFSFVEINEATNDFDPSWKIGEGRYGSVYKGQLRNMHVAIKMLPSYGCQSLLEFQHQVLVLSRVWRPLRSPLTGRCAEARSLPREVSDIGRLVTRLALIVSTPPPGLLRISCATTTGTLHNLFYPIHFLKMFG

SEQ ID NO: 282904 - protein, 104 aa, Glycine max
  Clone ID: PAT_MRT3847_97485C.1.pep
FPFCLPFNRFIFWLLLSENFPFGGEGLSLALSILVDLAFVSLFHPLFSNLTSSPVELVIFCYQITVWLLNYYYSESAIFSMHAWLQNKTTNLLKPRNKKTTFEV

SEQ ID NO: 282905 - protein, 208 aa, Glycine max
  unsure (1)..(208): unsure at all Xaa locations
  Clone ID: PAT_MRT3847_97486C.1.pep
MADGEDIQPLVCDNGTGMVKAGFAGDDAPRAVFPSIVGRPRHTGVMVGMGQKDAYVGDEAQSKRGILTLKYPIEHGIVNNWDDMEKIWHHTFYNELRVAPEEHPVLLTEAPLNPKANREKMTQIMFETFNTPAMYVAIQAVLSLYASGRTTGIVLDSGDGVSHTVPIYEGYALPHAILRFXILRGRDLTDALMXKILTERGYSFTTTA

SEQ ID NO: 282906 - protein, 45 aa, Glycine max
  Clone ID: PAT_MRT3847_97487C.1.pep
MGRTHAGEQPAQGPGEILTSRARDFKTAQGSKKSKPHATGIRVRT

SEQ ID NO: 282907 - protein, 104 aa, Glycine max
  Clone ID: PAT_MRT3847_97488C.1.pep
TVLWAFADEVRSEAVFSGCHMLTVGQYIEFSAVYTRVISMYVRGCNHGLYRWTALWFYILACVFFCFFFFFSFFFTPITDYHFTKSTIYNQIYWSKTRPTTTRP

SEQ ID NO: 282908 - protein, 43 aa, Glycine max
  Clone ID: PAT_MRT3847_97489C.1.pep
CVELMSCTEIGDVWIEIFYKKTSCLCSIRISPLISIMQNGFLL

SEQ ID NO: 282909 - protein, 153 aa, Glycine max
  unsure (1)..(153): unsure at all Xaa locations
  Clone ID: PAT_MRT3847_9748C.1.pep
MGFLSSFLGVFGFAVGIPLGLLVGFFLFVYSETKHVKDPVVRPISELGPNSLQELLPEIPLWVKTPDYERVDWLNKFLLDMWPFLDTAICKIIRSMTQPIFAEYIGKYQIKAIDXDELSLGTLPPTVCGWKGLETNEKEIXMEQVIKWAGNPN

SEQ ID NO: 282910 - protein, 54 aa, Glycine max
  Clone ID: PAT_MRT3847_97490C.1.pep
TQYNTRTRAALVLHAQNTKKLERQPCDRRGDLHHRIGCIAMQDNGPLPPIAYIV

SEQ ID NO: 282911 - protein, 66 aa, Glycine max
  Clone ID: PAT_MRT3847_97491C.1.pep
ADKYPFWGRPKEVDNSVNANALKCNLRPPGANVFVVPCTIIVWLIIAYQVRASQRCLMLFSDFRRG

SEQ ID NO: 282912 - protein, 112 aa, Glycine max
  Clone ID: PAT_MRT3847_97492C.1.pep
PWGWGLDGFCPPPSWYSGPWPFSPPPLGPRPLGFFHRFLPPPQGWVLRLLLPIRPPRPGFFSVFRTSPRWGWGSFSPFLSFFGVCLMVPPRGGGLGFFGRVPKSPPPALKHR

SEQ ID NO: 282913 - protein, 48 aa, Glycine max
  Clone ID: PAT_MRT3847_97493C.1.pep
FFFFFFFFFFFFFFFFFFFFFFLLTLNLSIFRRTLQGHIITKMIRNKL

SEQ ID NO: 282914 - protein, 67 aa, Glycine max
  Clone ID: PAT_MRT3847_97494C.1.pep
CPLSRDPKSNKINPNPTPHEHAVHFLILYFTLGSHCSSNNNNNRTSHVFFPMKGTAAKFRETVLSTH

SEQ ID NO: 282915 - protein, 86 aa, Glycine max
  unsure (1)..(86): unsure at all Xaa locations
  Clone ID: PAT_MRT3847_97495C.1.pep
MQVGEKAVESIMETATNIGASXKAGMEKTKATVQDKAQXMTSRDPVQNELATQLKEAXMNHADLDKQAARQHNTAVKQSDTTDGHM

SEQ ID NO: 282916 - protein, 62 aa, Glycine max
  Clone ID: PAT_MRT3847_97496C.1.pep
KQGAPPSPLPLFSTLFPLHTKPILKKKSPLDQSKQKRVKLPFVNSFFWKGFSIKTGLSPYFF

SEQ ID NO: 282917 - protein, 201 aa, Glycine max
  Clone ID: PAT_MRT3847_97497C.1.pep
IHQYSLCNFTLYRVGHACNMEAETNSPEDASAMAFGQHQVTDQTSVENVQPAETLIEVKNQENTNIKHPNLEGETTEINPTNDTKEQEKVPVSHTREEIENEDDGKYKQKKAKETEEATEMQLLKTATDSPPEDNVQSTVPTSEIVKGETEEISQQQTYKNDETVVIDTDKTTLQQGIEDGGNFDQQEATKIQLLNEEVGS

SEQ ID NO: 282918 - protein, 35 aa, Glycine max
  Clone ID: PAT_MRT3847_97498C.1.pep
SSNIILVHNIAICVSSGIHYSRRYIIEHTHLLIHS

SEQ ID NO: 282919 - protein, 62 aa, Glycine max
  Clone ID: PAT_MRT3847_97499C.1.pep
PPYANLIRHPPSGNGPPKRLGEFIKTSLFPMFAKNQKQGVEIEGHFGLFNPDKSPKTHFSFT

SEQ ID NO: 282920 - protein, 192 aa, Glycine max
  Clone ID: PAT_MRT3847_9749C.1.pep
NDRLKIALGSAQGLAYLHHECSPKVVHCNIKSSNILLDENMEPHISDFGLAKLLVDENAHVTTVVAGTFGYLAPEYLQSGRATEKSDVYSFGVLLLELVTGKRPTDPSFVKRGLNVVGWMNTLLRENRMEDVVDKRCTDADAGTLEVILELAARCTDGNADDRPSMNQVLQLLEQEVMSPCPSEYYESHSDH

SEQ ID NO: 282921 - protein, 156 aa, Glycine max
  Clone ID: PAT_MRT3847_974C.1.pep
MGFLKAIFIIAITMALSITLTMKTITHQEEAKPPFVHHDLPSSSSTPHQKNLLLPSKRESRFLAQVKNPNAADHCRKDHEICTLSGVKNSTCCNNKCIDVGYDKHNCGACKMKCKFTEVCCREECVDTNFDKRHCGECNHRCEVGAYCVYGMCGYA

SEQ ID NO: 282922 - protein, 292 aa, Glycine max
  unsure (1)..(292): unsure at all Xaa locations
  Clone ID: PAT_MRT3847_97500C.1.pep
DDFNSSPSKQVFLISTRAGGLGLNLVSANRVVIFDPNWNPAQDLQAQDRSFRFGQKRHVVVFRLLAAGSLEELVYSRQVYKQQLSNIAVSGKMEKRYFEGVQDCKEFQGELFGISNLFRDLSDKPRAGEIIELHEEHGHETEQPEEVNLSEEETSSSVLESETRLCNKSVRDATSKPDLVDLGIVYTHRNEDIVNFGPGIQGKIDTSIPLDDSLVKPSISLDXTTKEKKPDSIPKKQKVPLIDERKRTQYRLLAQSLGMGELAFSKWLLSATPLEREKVLLDFKKKKKIPNG

SEQ ID NO: 282923 - protein, 268 aa, Glycine max
  Clone ID: PAT_MRT3847_97501C.1.pep
MIHASLFFLQPTFSSPIPSFPIIRFLKVTIISSLSAFARSCQKTKLNEMKSFGSVTGFVLPDPKNRLLLWSVLILVSLISGAYFVGNAFFAKEYKQRLARWGLIHTMPHSKFNACKRQCLPFGSEALPEGIIARTSNLEMRPLWDSGKDNRILKRPLNLLAMAVGLKQKEIVNKIVEKFLSSGFVVMLFHYDGFVDGWKSLAWSSCAIHVSAINQTKWWFAKRFLHPDIVAEYNYIFLWDEDLLVDNINPETLSVRSIKSFYPHQTVV

SEQ ID NO: 282924 - protein, 75 aa, Glycine max
  Clone ID: PAT_MRT3847_97502C.1.pep
GSRKQAKTKEHLRIKDSNNREGEGGAPKRDRPHRTRPNQQHQQHWQRAGHAQDRNERYCNTSRNRHESGGPSTRP

SEQ ID NO: 282925 - protein, 28 aa, Glycine max
  Clone ID: PAT_MRT3847_97503C.1.pep
LRAHFAELLVSGYGFDLLLIMDYGFVIF

SEQ ID NO: 282926 - protein, 540 aa, Glycine max
  Clone ID: PAT_MRT3847_97504C.1.pep
MQRSGYGSDGIYRSLRPSIVFPKNSNLSLVSHLFNRVAAFPSKPALIDADSSETLSFAELKLLTVRVAHGLLRLGVTKNDVVLFLAPNDIRYIVCFLAVASLGAAVTTVNPAYTAAEVSKQANDSKPKLLVTVAELWDKLEHLKLPAVFLRCSNAPHAPSSATSFDALVQLAGSVTEFPEIKIKQSDTAALLYSSGTTGLSKGVVLTHGNFVAASLMIGFDDDLAGVLHSVFLCVLPMFHVFGLMVISYGQLQRGSAVVSLKKFEFELVLKTIEKFKVTHLWVVPPIILALAKHGLVDKYDLSSLKHIGSGAAPLGKELMKECAKRFPHAIVSQGYGMTETCGIVSVENARMGIRNSGSTGMLVAGMEAQVVSVDTLKPLPPGQLGEIWVRGPNMMQGYHNNPQATRLTMDKKGWVHTGDLGYFDEDGQLFVVDRIKELIKYKGFQVAPAELEGLLVSHAEILDAVVIPYPDAEAGEVPVAYVVRSPNSSLTEEDVQKFIAKQVAPFKRIRRVTFINAVPKTASGKILRRELIEKVRSKI

SEQ ID NO: 282927 - protein, 46 aa, Glycine max
  Clone ID: PAT_MRT3847_97505C.1.pep
RKTSSFVFVSQSTSHSFSSIWNCYQNYGHMAAFCLQFLLIMTATAS

SEQ ID NO: 282928 - protein, 192 aa, Glycine max
  unsure (1)..(192): unsure at all Xaa locations
  Clone ID: PAT_MRT3847_97506C.1.pep
ITRGAGWMVVSTXLSGKFGSITGCTASVENAGLLALTKAGSRRVVXISSGFMIFFSMFGKFGAFFASVPMPIMAALYCVLFGYVSSAGLGYLQFCNLNNFRNKSVLCISFFLGLSIPQYFTEYYHXSNIMKFLDGCCLGCFHFGCTLSREDDAAPKAIGLEWWERFGLYSSYVKNDEFYSLPCKLDKLFPPV

SEQ ID NO: 282929 - protein, 44 aa, Glycine max
  Clone ID: PAT_MRT3847_97507C.1.pep
RLGDLRVRFKALSIYLLMQQLCNAIFRQSQQYIFCQMHKYSSFI

SEQ ID NO: 282930 - protein, 89 aa, Glycine max
  unsure (1)..(89): unsure at all Xaa locations
  Clone ID: PAT_MRT3847_97508C.1.pep
LSHPYSSRXSIIRLNEGDPILIHLKHRSPSGTGILSAAGLTRWACCNTKPKDRESCSRSNWRWENQVSSSTPTKCYHCCSDCFHRLRYR

SEQ ID NO: 282931 - protein, 177 aa, Glycine max
  Clone ID: PAT_MRT3847_97509C.1.pep
KSIFYTLLLTTLLLSCLLSSNAKLIQVLQITRHGARTPNAFEYKPNLYPHTAGELTALGKIQQYHLGQEMRQRYVNKFGLISKDFDPSEVVIKSSGKKRVVESALSFINGLYPQIEGDLTIENLYHHDSLLDKILPHSEKHNKIEALDIQNVTLNLEWAEKVVQVIPMEKDMFFHAD

SEQ ID NO: 282932 - protein, 42 aa, Glycine max
  Clone ID: PAT_MRT3847_9750C.1.pep
PFFFFLILVSVPYINAFLHYRCIDHKFQPWKLQHSKYFKRHG

SEQ ID NO: 282933 - protein, 44 aa, Glycine max
  Clone ID: PAT_MRT3847_97510C.1.pep
KSKEYLCNRSAATVLARLLPHPQLDFSKSGINHPKVLRPPPERP

SEQ ID NO: 282934 - protein, 186 aa, Glycine max
  Clone ID: PAT_MRT3847_97511C.1.pep
MKHDTDNNGTLGGSEDSLLRSCLSLLTRRSFTACRESANQISRYDPTVSLHLDQILAVADVLTAAESRRGPSHPHDWYSVLRLHPGGADNRDLARQHFKTLVRLLDPNKNKLPFADEALMRVREAWCVISDPTRKARFDKEIEESARTASFWTMCPYCWYLHEYERKYEDCTLRCSNCQRTFHGAA

SEQ ID NO: 282935 - protein, 123 aa, Glycine max
  Clone ID: PAT_MRT3847_97512C.1.pep
EPGTDGEAFSSKGVQVLQKSSSVESGIDSLDESNIDEIEGDSTDDRMRRHLEYYKKCMDSLQKELEPERKVSAGATNEAMSMITRLQEEKPALQMEALQYLRMTEDQVEYDNDELEKVNDLLS

SEQ ID NO: 282936 - protein, 157 aa, Glycine max
  Clone ID: PAT_MRT3847_97513C.1.pep
LEGELGVKLFLRDSRGVSLTPEGLKVLDYAEQMMDTMQALKHAIEISSTKVGRLRIGVMDTVIHTWLSPLVAQMSDRFPLVEIELVADTALNLCDQLQKGFLDLVLQTDLLRQESIRSLKLISHPMGWVVASNSIYNREYASLAEIARERIVTFSKN

SEQ ID NO: 282937 - protein, 179 aa, Glycine max
  Clone ID: PAT_MRT3847_97514C.1.pep
MAFPSSSPFSLFFLLLSFFVFASSDDAPQTYIIHVAQSQKPSLFTSHTTWYSSILRSLPPSPHPATLLYTYSSAVSDGVHVISLSVGSSGYAPQYYRDSIAVGAFGAANHNVLVSCSAGNSGPGPSTAVNIAPWILTVGASTVDREFPADVILGDGRVFGGVSLYYGESLPDFKLSLVY

SEQ ID NO: 282938 - protein, 485 aa, Glycine max
  Clone ID: PAT_MRT3847_97515C.1.pep
MAFPSSSPFSLFFLLLSFFVFASSDDAPQTYIIHVAQSQKPSLFTSHTTWYSSILRSLPPSPHPATLLYTYSSAASGFSVRLTPSQASHLRRHPSVLALHSDQIRHPHTTHTPRFLGLADSFGLWPNSDYADDVIVGVLDTGIWPELKSFSDHNLSPIPSSWKGSCQSSPDFPSSLCNNKIIGAKAFYKGYESYLERPIDESQESKSPRDTEGHGTHTASTAAGAVVSNASLFHYAQGEARGMATKARIAAYKICWKLGCFDSDILAAMDEAVSDGVHVISLSVGASGYAPQYYRDSIAVGAFGAARHNVLVSCSAGNSGPGPSTAVNIAPWILTVVASTVDREFPADVILGDGRVFGGVSLYYGEKLPDFKLPLVYAKDCGSRYCYMGSLESSKVQGKIVVCDRGGNARVEKGSAVKLAGGLGMIMANTEANGEELLADAHLLAATMVGQAAGDKIKEYIKLSQYPTATIEFRGTVIGGSKPSA

SEQ ID NO: 282939 - protein, 146 aa, Glycine max
  Clone ID: PAT_MRT3847_97516C.1.pep
HCTATSTCLTTGDACSGHEGDVQPTNEQPLRSPPRCSHQQTRRKGHARKSKSNHFAARPRVTWSLDPPRWVVQPARRRNPARPIALTSLSQRSSNRVFGRDRKQLVDRHLVHRCRVHDGTGLAPEPPALNRDIHWRCVHVADFAPH

SEQ ID NO: 282940 - protein, 97 aa, Glycine max
  Clone ID: PAT_MRT3847_97517C.1.pep
MLGSGLGPEIHKILRPLQDQESKSCVKRLQTILAISTIAEVLGEQSSVVKHLECDHAGNISAMSLEMEQTEVFHFTESLDALRKKVAEAMDSLLKQQ

SEQ ID NO: 282941 - protein, 92 aa, Glycine max
  Clone ID: PAT_MRT3847_97518C.1.pep
FQFCNCCGAKSWSLSDILKWKIGCDCIIMLLLWRIGGSRFLVIMVWEDVVLAGWLAMHVLPPTPKKILFNEIVTHSVFLFFQGRGFFFNCIS

SEQ ID NO: 282942 - protein, 67 aa, Glycine max
  unsure (1)..(67): unsure at all Xaa locations
  Clone ID: PAT_MRT3847_97519C.1.pep
KNDHNLSTSYSPNIQTKKWVGDHGSKSQRNQSKGEASCQGSCSEDDLGGVSIYLCVFXRSAIIVVCF

SEQ ID NO: 282943 - protein, 73 aa, Glycine max
  Clone ID: PAT_MRT3847_9751C.1.pep
FPFVYASEIINKPAAGQDRVGFKMDYSNDATPPTLRGGPPTLGATSNTEKGKEIATGGGSGIKRRETKAHSGG

SEQ ID NO: 282944 - protein, 99 aa, Glycine max
  Clone ID: PAT_MRT3847_97520C.1.pep
MGDDSSSKEPPVCKKIGELGYNGHSSLALGGNNDLSSTGSLVSDFIGRLQVLEADLSFLKHSINLSSNGEEGLKLLQEIADQLQQLRQIGIRELDQPVA

SEQ ID NO: 282945 - protein, 58 aa, Glycine max
  Clone ID: PAT_MRT3847_97521C.1.pep
FEFKKSDPWFQKNCIGQLQHNSTKTGFPQNIWEKGKPKVKTHPILKKKGTKLCKPFYT

SEQ ID NO: 282946 - protein, 140 aa, Glycine max
  unsure (1)..(140): unsure at all Xaa locations
  Clone ID: PAT_MRT3847_97522C.1.pep
LRYRDAAHMIKKGEEVCXFNNDXDAKAGHVAXTTHWTANNQMQNATFMNIDGNLTYERITVMYNREEYPRVLIIFSGCDLSTRNAPITPDGHMKKYYWAPTRDESVGVCSGMFRTDNDPQDDIVELDDTFLDQSIDLFGA

SEQ ID NO: 282947 - protein, 56 aa, Glycine max
  Clone ID: PAT_MRT3847_97523C.1.pep
DSLFSFPRRSLAFISADSVISPVSRIFPPPSSAFWFVLFYLFFYFLCSNILCFFTF

SEQ ID NO: 282948 - protein, 44 aa, Glycine max
  Clone ID: PAT_MRT3847_97524C.1.pep
PTRPPTRPVFTTEPTIQSHTFNLILRSLSLQSLSLSNTFHSLGN

SEQ ID NO: 282949 - protein, 85 aa, Glycine max
  Clone ID: PAT_MRT3847_97525C.1.pep
LLQGRPNFNFTKIGQHHCIFFSPSFLGCDLLYLFGGCLPCRCSFPPSFLMNFFLEINIKNNATMPNHNPKNISQCRVHMAPDYKK

SEQ ID NO: 282950 - protein, 84 aa, Glycine max
  unsure (1)..(84): unsure at all Xaa locations
  Clone ID: PAT_MRT3847_97526C.1.pep
STPNTRHHHPWXXSVSTVGAVNRALLNLNGSGPGVSAXSSSSLGAVEXGYXLKXPQXQXFXXXAXDCCXKREXRIXAPQQXRXX

SEQ ID NO: 282951 - protein, 144 aa, Glycine max
  unsure (1)..(144): unsure at all Xaa locations
  Clone ID: PAT_MRT3847_97527C.1.pep
QNSRGSPPGKRNXAVFPPKSPDYTQGGSFSVKRDKIRAPSLLFGGRAQNNSPALFLFLVLKNDPFFSPPSQKSWLFANPPESNYFGFPTFLENELNGVCNNPCPDFELARVVSADTSIPSFPIFDFNFSLDAVGIYYPNFPFKK

SEQ ID NO: 282952 - protein, 204 aa, Glycine max
  unsure (1)..(204): unsure at all Xaa locations
  Clone ID: PAT_MRT3847_97528C.1.pep
MKKPRSPPQARTWLSEIRKYRYQLLCEIAQNFKINIIDRYLWSTIVLXKELQLLGISSLLXYEEILSPKVKDFITISNDAYSRNHILSMEKAILERLEWNFTVPTPYVFLVRFIRTFGLPPDQQKEKMTFFLAELXLVHYETANLSPPSMTAAAAVYAARCTLNRKHPWNEILKDMAGYTTAQLREFCTLDRGRKALLSPTKDI

SEQ ID NO: 282953 - protein, 49 aa, Glycine max
  unsure (1)..(49): unsure at all Xaa locations
  Clone ID: PAT_MRT3847_97529C.1.pep
KKXKKXXXXXXXXXXXXXXXXXXXXKVIVNFYLILSINLPLLQKRCYNK

SEQ ID NO: 282954 - protein, 78 aa, Glycine max
  unsure (1)..(78): unsure at all Xaa locations
  Clone ID: PAT_MRT3847_9752C.1.pep
AFRIESLGDCQPLDRHFSTWSRSGRRSSTEERGSRRSLLPASRSCSSNSVSVDAIAIGCLALLQQTHTTLXCITPLRP

SEQ ID NO: 282955 - protein, 155 aa, Glycine max
  unsure (1)..(155): unsure at all Xaa locations
  Clone ID: PAT_MRT3847_97530C.1.pep
MNNSGTPKSSSSELDLDRPNIEDYLPSGSTIQQEPHGKLFLHDLLNISPTLSEAAGAIVDDSFTRCFKSNPPEPWNWNVYLFPLWCFGVVIRYLILFPIRVIGLTIGWIIFLSSFIPVHFLLKGHDKLRRSIERSLVEMMCSFFVASXTXXVKYH

SEQ ID NO: 282956 - protein, 160 aa, Glycine max
  unsure (1)..(160): unsure at all Xaa locations
  Clone ID: PAT_MRT3847_97531C.1.pep
MGHCFSKPSTNEIPINYDYSPPPHHYQPRPHSHSDSRRTQQPQLQPQPGYPNRTPKSDPSPSSSSFGDQVAARILDKPYFDIKSLYNLERELGRGQFGITRLCTEKTTGRKYAXKSIPKRKLSKKKHTDDVKRESLILQHLSGQPNIREFKGAYEDWHTC

SEQ ID NO: 282957 - protein, 138 aa, Glycine max
  Clone ID: PAT_MRT3847_97532C.1.pep
MDFRVMGLDSPLFHTLQHMMDMSEDAAGDNKTYSAPTRSYVRDAKAMAATPADVKEYPNSYVFEIDMPGLKSGDIKVQVEDDNVLLISGERKRDEEIEGVKYLRMERRIGKFMRKFVLPENANTDAISAVCQDGVLRV

SEQ ID NO: 282958 - protein, 250 aa, Glycine max
  Clone ID: PAT_MRT3847_97533C.1.pep
MELSLNHQLGLVCVILLFPALCSCNEYFTNSRASYYNTPDGLGNPRGACGFEEYGRTINNGSVAAVSGLWRNGAGCGTCYWVRCKIPQYCGKGVQVVATDSGAGDGTDFIMSKRGFSGLARNVAASKELFKRGVVDIAFTRVPCNYPSNIKLRVHKSSKNPGYLAVLLLNVNGVRDITAVEMWQRGQKRWEPLRRVYGAVFDYANPPSGAILLRFQVGYGYWLPSNNPTPANWKPGATYDAEVRDYATGT

SEQ ID NO: 282959 - protein, 70 aa, Glycine max
  unsure (1)..(70): unsure at all Xaa locations
  Clone ID: PAT_MRT3847_97534C.1.pep
XQARVRKLGIRLEDKRKXCVRXFHXXWXXXQXXXXXCLCFXXLXXIAHYIXXKXXXXXXFIXNXSXKXXX

SEQ ID NO: 282960 - protein, 305 aa, Glycine max
  Clone ID: PAT_MRT3847_97535C.1.pep
MEEDQCWIKSRRKYSMSSNLDSSTNYPSSYDDHSSWEEQAFAKDAARSGCTWPPRSYSCSFCRREFRSAQALGGHMNVHRRDRARLKQPYSPQNEILSVDLEKITTQPLNSVQISFTSLGYLYPSSLGVLTHNNTNPNSDPYSHAPPSPSKVLVSSINKRGREKPQIPLYKGCHESSPDLPSKSMSNLTEDFRFCSRRLDPEAGVEKKLKGLDSRCGSTEGDDDKTDVAVSLNLFMNLARPTVQFETKEKDTSFKKRKEDASSIPFFPKSCSVDRLHMQSKMFELSPSSIEELDLELRLGYRSMV

SEQ ID NO: 282961 - protein, 75 aa, Glycine max
  Clone ID: PAT_MRT3847_97536C.1.pep
CTGSILCTFRYQKSISQGCRKNLVLSAQTKYNHDENIKPAAFSFLYNTHCQVVILISSTSLFLPSCWPLNMILFL

SEQ ID NO: 282962 - protein, 89 aa, Glycine max
  Clone ID: PAT_MRT3847_97537C.1.pep
GVINQGRKENIPDMKVVELAMQRWSGQHSRPFLFGILSDGTILCYHAYLYDSPDSHSKVEDSASAGGSIGLSSTNVSRLRNLRFVRVPL

SEQ ID NO: 282963 - protein, 39 aa, Glycine max
  Clone ID: PAT_MRT3847_97538C.1.pep
YQNLLQHTNLTWLLFKKKLFYQLPIYQLTIIASLFHLLK

SEQ ID NO: 282964 - protein, 45 aa, Glycine max
  unsure (1)..(45): unsure at all Xaa locations
  Clone ID: PAT_MRT3847_97539C.1.pep
KIRKVFNLCKEEDXRXYLNTYRGTFTTKNGEKGSKAPKIQRRGTP

SEQ ID NO: 282965 - protein, 110 aa, Glycine max
  unsure (1)..(110): unsure at all Xaa locations
  Clone ID: PAT_MRT3847_9753C.1.pep
DWYPQVDVQAQARAHRIGQNRNDLVKRFTTVHTVEDLVRASAEHNLGAANQSTTGGFFGNNTCAEDRREYLKALLRECKKKXPAPVLDDDAITDVSAPSESELNILEAVD

SEQ ID NO: 282966 - protein, 147 aa, Glycine max
  Clone ID: PAT_MRT3847_97540C.1.pep
TPGDYSLGTDAYEDSEHSFLAFRPGWKDIFRMNQNELESEIRKVSQDSTLDPRRKAYLIQNLMTSRWIASQQKSSQSLGVESSKGDILETSLSFHDPEKKIFGCEHYKRNCKLRAACCGKLFTCQFCHDKVSDHLMDRKATTEMMCM

SEQ ID NO: 282967 - protein, 215 aa, Glycine max
  unsure (1)..(215): unsure at all Xaa locations
  Clone ID: PAT_MRT3847_97541C.1.pep
LEVSPEERFLIXRVCPRPYRMYRCIVRYGYKDIQRDDGDFENHLIQSIAEFIQMEAVQPQFSSSEASSSLDGRMAVISSRNYDYASSLIVSEQEDIGVDISIPSSRSATLQSLQSVYDDETPQVRRRRVRFQLPENTGMDPDVREELLDLIQAKEAGVAYIMGHSYVKARKSSSFLKKLVIDIGYSFLRKNCRGPAVALNIPHISLIEVGMIYYV

SEQ ID NO: 282968 - protein, 135 aa, Glycine max
  Clone ID: PAT_MRT3847_97542C.1.pep
LRRAYGCEKTTEGEDIGVDMSVPSSRSATLQSLQSVYNDDTPQVRRRRVRFQLPENPGMDPDVREELLDLIQAKEAGVAYIMGHSYVKARKSSSFLKKLVIDIGYSFLRKNCRGPAVALNIPHISLIEVGMIYYV

SEQ ID NO: 282969 - protein, 102 aa, Glycine max
  Clone ID: PAT_MRT3847_97543C.1.pep
MEPVLDKLNAFAKSGQDFFDGLFRRRNPVEILKRLQREAFSDLMKLRERQDKVERVLSFYQSSKVGPFQETTTHVRGQVDFLGALLVLGNLDAVDKLGIRTG

SEQ ID NO: 282970 - protein, 83 aa, Glycine max
  unsure (1)..(83): unsure at all Xaa locations
  Clone ID: PAT_MRT3847_97544C.1.pep
VWQQLSRRFRINHDAERQVAVXWCRTELGPLVRVFQVCAKVHERAHSLXECAFSSYXLVWXKXVPCCQFSLCMLNVYLLKLLQ

SEQ ID NO: 282971 - protein, 111 aa, Glycine max
  Clone ID: PAT_MRT3847_97545C.1.pep
VLQPFSFTRKFQVEILKRLQREAFSDLMKLRERQDKVERVLSFYQSSKVGPFQETTTHVRGQVDFLGALLVLGNLDAVDKLGIRTGVDSRFIFETTMGDKATGAAEFVASH

SEQ ID NO: 282972 - protein, 62 aa, Glycine max
  unsure (1)..(62): unsure at all Xaa locations
  Clone ID: PAT_MRT3847_97546C.1.pep
MEKYKMERSSMLVDGDQXTKSKQDKEIRAAAEKLAECQETILILGRQLQAMRPPAESLGSSP

SEQ ID NO: 282973 - protein, 129 aa, Glycine max
  unsure (1)..(129): unsure at all Xaa locations
  Clone ID: PAT_MRT3847_97547C.1.pep
TSFGSSLYNGILPPRDPLSKVDAANASHESQTLCTKGTSTAENVTQKTAICDRGGNAXQEKGLVATSAGRIVMILANNEHYGDELVADSYLLPAQALGQKPSNAXRTLLSHLPNPQVSLXFGGTQLGLQ

SEQ ID NO: 282974 - protein, 45 aa, Glycine max
  Clone ID: PAT_MRT3847_97548C.1.pep
YLLKLDFLLILFNLILRVGFPILRSRCVVIGINGYENTESYMTIG

SEQ ID NO: 282975 - protein, 54 aa, Glycine max
  unsure (1)..(54): unsure at all Xaa locations
  Clone ID: PAT_MRT3847_97549C.1.pep
LPFIFGVHGWQASYSXXGAFIXYSLFSSFFVLPLTWGVIICWNIQILHHGSCMT

SEQ ID NO: 282976 - protein, 65 aa, Glycine max
  Clone ID: PAT_MRT3847_9754C.1.pep
KTKATIYTQILLLPQIDILRHLFQTYLTLFLLIKQCFFCCLFQKKKKKKKKKKKKKKKKRKKKKK

SEQ ID NO: 282977 - protein, 62 aa, Glycine max
  Clone ID: PAT_MRT3847_97550C.1.pep
CGHLALLLTVFTGSAVSIKKDPFRPAIVLHWHWATRHSSIAFFTYKSCWHLGVWEEPFHNRE

SEQ ID NO: 282978 - protein, 73 aa, Glycine max
  Clone ID: PAT_MRT3847_97551C.1.pep
LTHTFSLSLSHPDRVAIASAPTPRAAFVYMAKLAEQAARYEEMVDFMEKVTASAERDELTVEERNLLSVAYKN

SEQ ID NO: 282979 - protein, 70 aa, Glycine max
  Clone ID: PAT_MRT3847_97552C.1.pep
VSEQWSDVPFRMGDMIIFNSLRDAVSLGWSLSDCTTSKPENDAAADRPAHEIGYSDSKDVVLAQIKSLGT

SEQ ID NO: 282980 - protein, 61 aa, Glycine max
  Clone ID: PAT_MRT3847_97553C.1.pep
NVAIPLLFLLVWSPPPPLPKDEPPQPQQQRPPKKVVFKKWQHPAAPFFYEQPSLVPPFVNV

SEQ ID NO: 282981 - protein, 66 aa, Glycine max
  Clone ID: PAT_MRT3847_97554C.1.pep
CPPNKLHVGQMMLLHVCAIAQRHFLPLNIQFTKGCVDLCSLLNSSNECLCHHYQSFAARALSSEKR

SEQ ID NO: 282982 - protein, 79 aa, Glycine max
  Clone ID: PAT_MRT3847_97555C.1.pep
GGKSYFNTFDTKYAAFCEGNLDLQEQCGSPKKLNTVWGPLNPLETPVKHTHTPQARTIIYSLANCVPQNCYYLPGAGLI

SEQ ID NO: 282983 - protein, 29 aa, Glycine max
  Clone ID: PAT_MRT3847_97556C.1.pep
LYIFQTLTMNGWLHIGECRYLTLGICTFS

SEQ ID NO: 282984 - protein, 84 aa, Glycine max
  Clone ID: PAT_MRT3847_97557C.1.pep
TLPALIVRTAHFEDATNPACLSKLDSAKYIFPRVADGYLNYISMELIYQHTLLADGFGLYTWKYITSVIKSKNDDVLFEAAWSL

SEQ ID NO: 282985 - protein, 67 aa, Glycine max
  unsure (1)..(67): unsure at all Xaa locations
  Clone ID: PAT_MRT3847_97558C.1.pep
TLVIRQNIFLFKCWLXFKGGIIKTSTFHVLFHPKQFPXGFTFPISFKHNPGSYHPGVQPXGXEHXTL

SEQ ID NO: 282986 - protein, 116 aa, Glycine max
  Clone ID: PAT_MRT3847_97559C.1.pep
KKTPFPLFCKNASPPGVPNSFILFPRVFSFLKTGVWPRFPSLKFPPFLCPPVFVSLLFGPPIFFPFYSLTFFLWGLFFAFLFPPFNTPPHKLAKFPSPPLFEKTVSTQRNNLKIPK

SEQ ID NO: 282987 - protein, 88 aa, Glycine max
  unsure (1)..(88): unsure at all Xaa locations
  Clone ID: PAT_MRT3847_9755C.1.pep
QAFFVSWNPTKNATSYRRVPVFVPQRHILYGHGVCGQGDVEXIHKMVSHNMFYLNLVGFGIKQDGPLXDHQLSNQGPFNPFCKQNLNF

SEQ ID NO: 282988 - protein, 46 aa, Glycine max
  Clone ID: PAT_MRT3847_97560C.1.pep
EKKSRSSTHALESPFLVPFIVRVPRIQQTNFFLSDCPNVLYLVNSM

SEQ ID NO: 282989 - protein, 67 aa, Glycine max
  unsure (1)..(67): unsure at all Xaa locations
  Clone ID: PAT_MRT3847_97561C.1.pep
PTKQILNPLVDFHPREXGFPPFEEKKSRNWSFFIHPKKVKEKLSLSGKLLAFKTMVLGKFPQLIWAF

SEQ ID NO: 282990 - protein, 201 aa, Glycine max
  Clone ID: PAT_MRT3847_97562C.1.pep
PKTPPFEKKAVPSRTQRIMESVSVSGEVGGAGGAYSYEALKRLDQQWSSICSSQEVVQEPQQVVSTIPSLFGSSDLADKAEGSYDVLVCGGTLGIFIATALCARGLRVAIVERNVLKGRDQEWNISTKELLELVEVGVLEEDDIERATAVKFNPNRCGFERKRDIWVNDILNLGVSPAKLIEIGKTRFISLGRGFFEGGGV

SEQ ID NO: 282991 - protein, 69 aa, Glycine max
  Clone ID: PAT_MRT3847_97563C.1.pep
FEHDCFSLVINIEAKQISCVLNEPYIKHNYQYCGLWSSHELLQSLNSCVFFNSSHGSCNCDQNGSYSGS

SEQ ID NO: 282992 - protein, 183 aa, Glycine max
  unsure (1)..(183): unsure at all Xaa locations
  Clone ID: PAT_MRT3847_97564C.1.pep
MANFLAQFQTIKNTSDRLVISVEDVSDLWPTVKPAFEARLPFKRATLNNKTRNPVFVDTLPAEFILTTDSRLRSRFPQEQFLFWFREPYATVVLVTCEDLDEFKTILKPRLKLIVQNDEKEWFVVFVSKAHPANDQXSKMAKKVYAKLEVEFTXKKRRCXQYDMHFPEAXFWEDLESKIMECI

SEQ ID NO: 282993 - protein, 67 aa, Glycine max
  Clone ID: PAT_MRT3847_97565C.1.pep
RQPPPPIGVPHNKVAIQHSFSLAKDFGGPKQFYVQWATPFFFPLKEFCLPTFLFVHKLNMGCNITPL

SEQ ID NO: 282994 - protein, 44 aa, Glycine max
  Clone ID: PAT_MRT3847_97566C.1.pep
PLKDCTCIGVSQHESMFFLVRRSPKNLNDHTYVVMVVANMVATE

SEQ ID NO: 282995 - protein, 216 aa, Glycine max
  Clone ID: PAT_MRT3847_97567C.1.pep
LETIHRRFDLKGSSLGRITIKPESEISETTILKDLDLNFIFRLQKSWFQGFCRQIDRDCELLEQEGIMDYSLLVGIHFKDISENGDLISSRSHTLAGDSESEGTPCISRVDMDQLLLDPTSWASIKLGVNMPARAERTVRRSGCELQLVGEPIGEFYEVDLIFGIIDILQDYDISKKLEHAYKSIQYDPTSISAVDPRQYSRRFRDFIFKIFSEDS

SEQ ID NO: 282996 - protein, 108 aa, Glycine max
  Clone ID: PAT_MRT3847_97568C.1.pep
ERPLSSCKYLRVCLSLSKLPPYRRLRLFSMLLVSYGVLFMAITYHVLLVYTLISTAVACLNAGILANAYPPATTALRVAFPLGCHQWLPNGYRTAATLDLVVLRVVGA

SEQ ID NO: 282997 - protein, 97 aa, Glycine max
  Clone ID: PAT_MRT3847_97569C.1.pep
SSCIVYLHISVVTCRQLKVRIAFMVVYTKCCQTISMVICTVRAWPRYECVTSLIHHHGEVCRDRPSRHHILYLDQPISFSGNKSAVSLTPFCGVFRT

SEQ ID NO: 282998 - protein, 91 aa, Glycine max
  unsure (1)..(91): unsure at all Xaa locations
  Clone ID: PAT_MRT3847_9756C.1.pep
YXHSYXTSEFXXSXXXXHPXKXXKIQSPXXLXEXXXXTLMLKSLXXXXSXYLTIAFLNXMHXRYSYXXIXTTLKLQXXXYXXSKILXLIYX

SEQ ID NO: 282999 - protein, 73 aa, Glycine max
  Clone ID: PAT_MRT3847_97570C.1.pep
RLNTKHGYIFKSYLNDPFSVFICFKYPLQLHIHGCNIPIDLIRYYCNILFAFNKICISSSLILFFHINTVFST

SEQ ID NO: 283000 - protein, 51 aa, Glycine max
  Clone ID: PAT_MRT3847_97571C.1.pep
TNVARTAETRALLLCPKGLRTKWMMTTNWHMLIYRAEATLNIFLHDGRLNQ

SEQ ID NO: 283001 - protein, 58 aa, Glycine max
  Clone ID: PAT_MRT3847_97572C.1.pep
GVTQRLHSMMAGGGNRIRELALGAGEAPRRPALAETATQNTHNSSLTASDEFTYLDCW

SEQ ID NO: 283002 - protein, 218 aa, Glycine max
  Clone ID: PAT_MRT3847_97573C.1.pep
TRPVHCQVQEHAQNCPGVPGQVAITQDPSATSAVSSTDQNQNAAPVAATASQTAVTTTIPGQVSNQPPNPASQTQAPVQTAGQPTAEQWYQQQQYQQYYQQYPGQDPYQQQYQHYYPYQQSVVPQYQQAYGQPQPQSQSQPQGQLQPQSQPQPQLQPQPQAQGLSHPPTHIQAPVVPPSQNQMQVQQPPQQLQPAVQPQGQMSHAPCHGQAIPQSQTQ

SEQ ID NO: 283003 - protein, 123 aa, Glycine max
  Clone ID: PAT_MRT3847_97574C.1.pep
AESKLQNYYSISEPTPWNHNQFIHFGCSHSRSGPGDFDFTILPLPDRTTSFCGGALLLLSAKAIYLCLARLRRCGSCVRGWSWVRDKVSERYAGAGDFRVSWSSVCGVGVGFRGDSARVEECG

SEQ ID NO: 283004 - protein, 574 aa, Glycine max
  unsure (1)..(574): unsure at all Xaa locations
  Clone ID: PAT_MRT3847_97575C.1.pep
MSVYRLLLRRVAVARPMFSLTQTRSYAFSSAEEAAAERRRRKRRLRIEPPLRPIRPPPQQGPPRDPNAPRLPDSTSALVGPRLSLHNRVQSLIRAGDLEAASAIARHSVFSVTRPTVFTCNAIIAAMYRSGRYEEAIALFHFFFKQSNIVPNIVSYNNVINTHCDQGRVDVALEVYRHVVANAPFSPSPVTYRHLTKGLIHSERISEALDLLREMLSKGHGADSLVYNNLISGFLHLDNFDKAIELFDELKERCLVYDGVVNATXMEWFFSKGRDKDAMDSYRSLLDRQFRMTPATCNVLLEALLNHSKTSEAWSLFDNMLDNHTPPNFQAVNSDSFNIMVNHCFKLGNFELALSTFKKVGSKPNSKPFAMDVAGYNNIIARFCENAMLSQAETLFEELCSKSLSPDVPTHRTLIEVYLRMDRIDDALRIFHRMVDSGLRVVATFGNTVFHELIKNGKAIDCAQILSKMGEKDPKPDPTCYEVVIKGLCADGLLDKSRELLDEVMRYGVGVTSSLREFVTEVFKKAGRGDEIERLLDMNRFAYTPRPSPPRPAYCPPLVRSPSQMAAGAAHSPP

SEQ ID NO: 283005 - protein, 81 aa, Glycine max
  Clone ID: PAT_MRT3847_97576C.1.pep
IWQIKISQKVSFFIWRILHHDRLPIKDNLHKRHIQVQDEYLKCVMCNQVQEDASHVSFFRAKFTSHLVEMVQFIGHTHSTP

SEQ ID NO: 283006 - protein, 91 aa, Glycine max
  Clone ID: PAT_MRT3847_97577C.1.pep
NEELRSHLEKLRLEQASLLEVSNITTKSDGQIENSISNLPEMVTENISLKGQLIKEQSRSESLLAEIMKLSAELRKAVQAQNNLVRLYSLY

SEQ ID NO: 283007 - protein, 145 aa, Glycine max
  Clone ID: PAT_MRT3847_97578C.1.pep
MPKNKGKGGKNRKRGKNEADDEKRELVFKEDGQEYAQVLRMLGNGRCEAMCIDGTKRLCHIRGKMHKKVWIAAGDIILVGLRDYQDDKADVILKYMPDEARLLKAYGELPDTTRLNEGIGAGLDEEEDGSGNDYIEFEDEDIDKI

SEQ ID NO: 283008 - protein, 501 aa, Glycine max
  Clone ID: PAT_MRT3847_97579C.1.pep
MAYYRFLDVFSWIQNLPPIPGWKTASMSLSICSTNSSQPSLNLTIAKNHHQSSRISLAIVADFNIPISLWTSKPFKPSTKTMRLKDDETLSNLLVNFIEEILHYGTNKHSIPYIKFPKLDSVSNFQDIFNLAFLTLLFLVCIYEAPSDLRSGCLNTLKEQLAGCQSRQASKFLMKLLGSNLEEQWMRSVNLAITNWIVEIQEAHHTDHTTIRTPSPLFSYAFSTFGLWKVQLYCPVINMDVVNANNHPADERLQFSLKYQQLEGVLQFNYKVTIRERWVEIVVNIDNIRCDVFKLVNDILMRERGAGAAEKHFPSRISLQLTPTIQQQVLTVSVGKSSENPRIEFGVEKGIEASFEPPNPYIGLSVSAGESTTVSLKPWKFEQSVHGYSANLNWFLHDSTDGKEVFSTKPSKVALFNPKSWFKDRYSSAYRPFTRQGGVIFAGDEYGESVCWKVDKGAVGKTMEWEIRGWIWITYWPNKHKTFYHETRRFEFRETVYLKIA

SEQ ID NO: 283009 - protein, 50 aa, Glycine max
  Clone ID: PAT_MRT3847_9757C.1.pep
LKLYPPKELARYIISLSQTKKVYRSSHNGILRDPGRSLRHCKHYVSWVPN

SEQ ID NO: 283010 - protein, 79 aa, Glycine max
  Clone ID: PAT_MRT3847_97580C.1.pep
HTHTHIYFNYLYQLFFSFIICIYCYVYCFFTFLIFIYYFVSINNYIYIWSAMASTISATSSAINLWRIFWLAAMVRHPP

SEQ ID NO: 283011 - protein, 69 aa, Glycine max
  unsure (1)..(69): unsure at all Xaa locations
  Clone ID: PAT_MRT3847_97581C.1.pep
IRRGTYVFNALALEAADVFXGEANVRKVLQMLRDEFELTMVLSGWHSLKVITHNHVVIEWDHPRFALKL

SEQ ID NO: 283012 - protein, 407 aa, Glycine max
  unsure (1)..(407): unsure at all Xaa locations
  Clone ID: PAT_MRT3847_97582C.1.pep
MKGIIALHTLLPFLLFSAILPLSFSAQPRNAKKPKTPYSDNNHHRLSSSAVFKLQGNVYPLGHYTVSLNIGYPPKLYDLDIDSGSDLTWVQCDAPCKGCTKPRDQLYKPNHNLVQCVDQLCSEVHLSMAYNCPSPDDPCDYEVEYADHGSSLGVLVRDYIPFQFTNGSVVRPRVAFGCVRARCGYXQKYSGSNSPPATSGVLGLGNGRASILSQLHSLGLIRNVVGHCLSAQGGGFLFFGDDFIPSSGIVWTSMLSSSSEKHYSSGPAELVFNGKATAVKGLELIFDSGSSYTYFNSQAYQAVVDLVTKDLKGKQLKRATDDPSLPICWKGAKSFESLSDVKKYFKPLALSFKKIMNLQMHLPPESYLIITKHGNVCLGILDGTEVGLENLNIIGDITLQDKMVIYD

SEQ ID NO: 283013 - protein, 181 aa, Glycine max
  unsure (1)..(181): unsure at all Xaa locations
  Clone ID: PAT_MRT3847_97583C.1.pep
GYDEAICPXDYEHEGKILDDEINATIVRPLPRGAKLHALVDTCFSGTILDLPFMCRMNRKGYYGWEDQRNPRAGYKGTRGGLAVCISACDDDGNAADTSALSGEESSGALTFSFIQAMQNESNLTYGHLLNSMRSTIRGAKEKAFGQNDQDFTMNTRQQYTHEPQLSSSEKFDIYSKSIEM

SEQ ID NO: 283014 - protein, 74 aa, Glycine max
  Clone ID: PAT_MRT3847_97584C.1.pep
PVFFTVADTVQYMRKYLLMFQLVLLLPSLLPSYIASSMESEKQSHQPQPPMMFPFIFIFSSTISRTLSWNRSRE

SEQ ID NO: 283015 - protein, 110 aa, Glycine max
  Clone ID: PAT_MRT3847_97585C.1.pep
TATALLRHPPLTPLATSSLSAMSRTATATPPPAYFPPRNATPTMRHCAAPNVNAVHLGPRHAHEPHHPKKKARNVSAAFVGALSPEEEADGDGNGYAGGRGASHVIRGDL

SEQ ID NO: 283016 - protein, 40 aa, Glycine max
  Clone ID: PAT_MRT3847_97586C.1.pep
SIIQSIKSFLHCCYYEITFQTSYSERKGCSYHRWSLLILI

SEQ ID NO: 283017 - protein, 321 aa, Glycine max
  Clone ID: PAT_MRT3847_97587C.1.pep
MEGGLWKKELVLRFVVLAVAVVNTVQWNGEGTRVGFYSSTCPRAESIVRSTVESHLRSDPTLAGPILRMHFHDCFVRGCDASVLIAGAGTERTAGPNLSLRGFDVIDDAKAKIEALCPGVVSCADILSLAARDSVVLSGGLSWQVPTGRKDGRVSIGSEALTLPGPNDTVATQKDKFSNKGLNTEDLVILAGGHTIGTSACRSFADRIYNPNGTDPSIDPSFLPFLRQICPQTQPTKRVALDTGSQFKFDTSYFAHLVRGRGILRSDQVLWTDASTRGFVQKYLATGPFKVQFGKSMIKMSNIGVKTGSQGEIRKICSAIN

SEQ ID NO: 283018 - protein, 54 aa, Glycine max
  Clone ID: PAT_MRT3847_97588C.1.pep
ARNSLEASTRGFVQKYLATGPFKVQFGKSMIKMSNIGVKTGSQGEIRKICSAIN

SEQ ID NO: 283019 - protein, 78 aa, Glycine max
  Clone ID: PAT_MRT3847_97589C.1.pep
MSPIKRATSVVKNGSIGQSGPHVKTSAVTGVGLQELLELIDKKLSVQNKKGARVVERSIYDRKWRPSHNQESGIAVEQ

SEQ ID NO: 283020 - protein, 90 aa, Glycine max
  unsure (1)..(90): unsure at all Xaa locations
  Clone ID: PAT_MRT3847_9758C.1.pep
HVLLHDCLFCMDCLSLYAALXGSRMVNCMGALELRLVRSGTFRNILGHYLGLGTAVCRYRTPRCVGPTYTGVFAILSDIVVGIYLSTAFI

SEQ ID NO: 283021 - protein, 492 aa, Glycine max
  unsure (1)..(492): unsure at all Xaa locations
  Clone ID: PAT_MRT3847_97590C.1.pep
MSYQDEFPDNYFMSCIGSVTGFKDGDVEVTWATGFTTKVCCXAPYEIFRIEKHEGSTVTPTPFETNVEEFTHEIIEHRSLPSDQKGKDLLNGDGTRENCEKNLGECSSFSLPRAAFELFSSIKASIFQTFRGTLISGAVSSVPTFEKKNGYDCLDKKDLETSDLFTEQHPMAELQYTEDKTSYPENIEIHEKNDFPFSLDSNSSNQFKQFDVIENCPDHHFFVEGKGLSTSQVKRSWVKKVQQEWSILEKNLPETIYVRVFEERMDLMRAAIVGASGTPYHDGLFFFDICFPPEYPNEPPMVHYNSAGLRLNPNLYESGKICLSLLNTWTGTDTEVWNPGASTILQVLLSLQALVLNEKPYFNEAGYDQQIGRAEGEKNSVSYNENAFLVTTKSMMYLLRKPPKHFEALVEEHFRKCSQHILLACKAYLEGASIGCAFGSGKTGHENQKGTSTGFKIMLAKLFPKLVEAFSDKGIDCSQFVDLQKEPLLTKL

SEQ ID NO: 283022 - protein, 38 aa, Glycine max
  Clone ID: PAT_MRT3847_97591C.1.pep
CASDSKYHILRSSFGIFGCSHRIRQEKSLSSNEQVSES

SEQ ID NO: 283023 - protein, 77 aa, Glycine max
  unsure (1)..(77): unsure at all Xaa locations
  Clone ID: PAT_MRT3847_97592C.1.pep
MGIVEEAHNVKVLGSGTRHIVLAHGXGTDQSVWKHLVPHLLDEFRVVLYDNMGAGTTNPDYFDFERYSTLEGYAYDL

SEQ ID NO: 283024 - protein, 76 aa, Glycine max
  Clone ID: PAT_MRT3847_97593C.1.pep
PRYASKWTGVAICERAHVFPNFPRGPTIPHNVTSFNIAQYGAQLRACPELSGKPGTPQRVLLFSCAIVFYGFKGSS

SEQ ID NO: 283025 - protein, 74 aa, Glycine max
  unsure (1)..(74): unsure at all Xaa locations
  Clone ID: PAT_MRT3847_97594C.1.pep
PPATKPDIRTLLMYILQISTKYLMLTLSIHLLLIALGRFLFSLSSLVQPLGTTKHKXSLKINGKPPGNKSFSST

SEQ ID NO: 283026 - protein, 66 aa, Glycine max
  unsure (1)..(66): unsure at all Xaa locations
  Clone ID: PAT_MRT3847_97595C.1.pep
SXIXIMGXLXVXGEXDQTIKXXCVCFVLXSXLIXVVAHSXALCXXGVDVKYLRTQXXXAFPSXXLG

SEQ ID NO: 283027 - protein, 222 aa, Glycine max
  Clone ID: PAT_MRT3847_97596C.1.pep
MRKGRGGGASAAAVDVNGSILKEPRYRGVRKRPWGRFAAEIRDPLKKARVWLGTFNSAEDAARAYDAAARTLRGPKAKTNFPPLSPFCYPHPTTDPFFYTGFHDQHHHHNNNNLNNPQRPTSSGMSSTVESFSGPRPPTTTTTTTTTTATPFLTATRRYPRTPPLVPEDCHSDCDSSSSVVDDGDDNIVSSSFRPPLPFDLNALPFDDAAADDDLRRTALCL

SEQ ID NO: 283028 - protein, 48 aa, Glycine max
  Clone ID: PAT_MRT3847_97597C.1.pep
KAFLLQNWKAKQTANYTITHTKSSELWWPLSTYWLTQLVVLLRSTAVW

SEQ ID NO: 283029 - protein, 57 aa, Glycine max
  Clone ID: PAT_MRT3847_97598C.1.pep
PLKNILISFPLVWEERLQSLLGEHLICEKNMNFFSILPTKGLFGGALFSAINYTFST

SEQ ID NO: 283030 - protein, 190 aa, Glycine max
  Clone ID: PAT_MRT3847_97599C.1.pep
MGLKNSGVGHRAWSLLRASLLWASKGGVLRRRVAMELRLVPKYLKRLGHTAPPSHIHYFERELSFDKTPIFHVKMYRPTTMRFHLPHIPCINPHVDFNDDDDGNVEYDTGGRKSALMDASGDSRDQEFYLDYEGCQEMGCGEEEEEQQLDAQGIDKQAEEFIAKFYQQMRLQRQISLLQYNETPRSDTSC

SEQ ID NO: 283031 - protein, 68 aa, Glycine max
  Clone ID: PAT_MRT3847_9759C.1.pep
IEEEDPPCLLIGRMISLGHMTAMSFSEHIIQASSALESLPVHTEGGNLASSGRHPADGIYEDDVSDRV

SEQ ID NO: 283032 - protein, 81 aa, Glycine max
  unsure (1)..(81): unsure at all Xaa locations
  Clone ID: PAT_MRT3847_975C.1.pep
MGSKTKTFTFEEVAKHNHRKDCWIIVKGKVYDVTPFLDDHPGGDEVLVTATEKDATTDFXEDIGHRDSVTXMMEKYFVGGG

SEQ ID NO: 283033 - protein, 49 aa, Glycine max
  Clone ID: PAT_MRT3847_97600C.1.pep
PISLTRFSFSPTSRVVVLSSSLPPPRKMNSPIFSPCIAWHCPAGHGCCM

SEQ ID NO: 283034 - protein, 58 aa, Glycine max
  Clone ID: PAT_MRT3847_97601C.1.pep
SKSFALAPRVRPRVRPDPTGFSSFVYYLRFFLDMMIGYLVIALPYILDSLSLIKLVIL

SEQ ID NO: 283035 - protein, 101 aa, Glycine max
  unsure (1)..(101): unsure at all Xaa locations
  Clone ID: PAT_MRT3847_97602C.1.pep
SQEXXSXCXXHNYXXXXXTXXXXXXXXTXXXVXXXXLXXXXXXXXXXXSXYXGLESXXFXVXXXXLTSSXXXXDXXXXDTXXXXGMXVXXXXXXXXXNWXV

SEQ ID NO: 283036 - protein, 93 aa, Glycine max
  Clone ID: PAT_MRT3847_97603C.1.pep
RAVGKGLPGVLLLCLLLFQFKMGGVATNAGGDFGVWPWKTVGGPKGKVFEGETTTDFIFGLGTNIVWAGTKAGYNGCKTPRGAKVFKPGPVQI

SEQ ID NO: 283037 - protein, 161 aa, Glycine max
  unsure (1)..(161): unsure at all Xaa locations
  Clone ID: PAT_MRT3847_97604C.1.pep
HASALIHLVVGVVYCLISWSVGLPKRAPINGTLLKLLFPVALCHGIGHITSNVSFAAVAVSFAHTIKALEPFFSAAATQFILGQQVPFSLWLSLAPVVIGVSMASLTELSFNWTGFINAMISNISFTYRSIYSKKAMTDMDSTNVYAYISIXALIVCNSLQ

SEQ ID NO: 283038 - protein, 54 aa, Glycine max
  Clone ID: PAT_MRT3847_97605C.1.pep
NMSLIVIRLAGSYKYWEIFDTRFALAEGSRFDIKPGRSKFFYLECITRPSLFLQ

SEQ ID NO: 283039 - protein, 201 aa, Glycine max
  Clone ID: PAT_MRT3847_97606C.1.pep
MGVFSNKIDRKQLKPGDHIYSWRQAYIIAHHGIYVGKGMVIHFTRGSSQETETRTMLGGFYLSSPHHASRDTPCPKCGYQTKTEGVTQTCLDCFLYGGYLYLFECGVSPAFFLAKARGGTCTIASSDSTEAILRRAFFLLKKGFGGYHLFKNNCEDFAMYCKTGLLLVRTSIMSVGQSGQATSLLAAAGAIVSSSLVVMIT

SEQ ID NO: 283040 - protein, 55 aa, Glycine max
  Clone ID: PAT_MRT3847_97607C.1.pep
ILLDFSATFDNPSLLSARFVMPPALSRIRACGTSRHTSTRLSSTPRASAQRRDAW

SEQ ID NO: 283041 - protein, 198 aa, Glycine max
  Clone ID: PAT_MRT3847_97608C.1.pep
MGINICLSLCFFYITTLHRTISTLAQSENYIIHMDISAMPKAYSSHHTWYLSTLSSALENSKATTDNLNSKLIYIYTNVINGFSANLSPKELEALKTSPGYVSSMRDLRAKRDTTHSPQFLGLNKNVGAWPASQFGKDIIVGLVDTGISPESKSYNDEGLTKIPSRWKGQCESSIKCNNKLIGARFFIKGFLAKHPNT

SEQ ID NO: 283042 - protein, 63 aa, Glycine max
  Clone ID: PAT_MRT3847_97609C.1.pep
SIIIISCNHSVERKKMVSAIVGPLFQPVNHKRNSVVPQRIIGLPNQLYDIMKFFGKIYFMVNV

SEQ ID NO: 283043 - protein, 146 aa, Glycine max
  Clone ID: PAT_MRT3847_9760C.1.pep
DSSNSFNVSTVEGCQNSGGSPETPTSNKESGARDDKESKFSSSKEKEINSDRNTEATRFGQVFSASLGNINMEAEQSAMQQQIVTMYMRSMQQFTESLAKMKLPMDLDKPESEGQLGVIQNPNSSKLETDKKKDGSRVFYGSRAFF

SEQ ID NO: 283044 - protein, 102 aa, Glycine max
  Clone ID: PAT_MRT3847_97610C.1.pep
KKDNFKDHLKNKFHDGHEKKTFKTPNQSFRKGQPQKPVLKIPKKKLTGALNPLDGKCPPRKRARAILGKILPPKRGGVYALKARGRISNIFTISRGLNWIKP

SEQ ID NO: 283045 - protein, 43 aa, Glycine max
  Clone ID: PAT_MRT3847_97611C.1.pep
IIFISYSKHLHNYLCHKISPINKLFQTHQLPIFFLLANKIITI

SEQ ID NO: 283046 - protein, 339 aa, Glycine max
  unsure (1)..(339): unsure at all Xaa locations
  Clone ID: PAT_MRT3847_97612C.1.pep
MGCFSCFDSREDEMLNPNPQQENHHHEHEHDHDLKPPVPSRISRLPPSASGXDKLRSTTSNGESKRELAAAVQIAAQIFTFRELAAATKNFMPQSFLGEGGFGRVYKGLLETTGQVVAVKQLDRDGLQGNREFLVEVLMLSLLHHPNLVNLIGYCADGDQRLLVYEFMPFGSLEDWLHDLPPDKEPLDWNTRMKIAAGAAKGLEYLHDKANPPVIYRDFKSSNILLDEGYHPKLSDFGLAKLGPVGDKSHVSTRVMGTYGYCAPEYAMTGQLTVKSDVYSFGVVFLELITGRKAIDSTRPHGEQNLVTWARPLFSDRRKFPKLADPQLQGRYPMRGLYQ

SEQ ID NO: 283047 - protein, 211 aa, Glycine max
  Clone ID: PAT_MRT3847_97613C.1.pep
MGCFSCFDSREDEKLNPNPQQENHQHEHEHEHDLKPPVPSRISRLPPSASASASASAVGADKLRSTTSNGNGESTAVQIAAQTFSFRELAAATKNFRPQSFLGEGGFGRVYKGRLETTGQVVAVKQLDRNGLQGNREFLVEVLMLSLLHHPNLVNLIGYCADGDQRLLVYEFMPFGSLEDHLHDLPPDKEPLDWNTRMKIAAGASKRIGIP

SEQ ID NO: 283048 - protein, 60 aa, Glycine max
  Clone ID: PAT_MRT3847_97614C.1.pep
YAWNAQALKWTHSSMRDPSAQKSLTLSPWTRWGSISKYSRMNMLKIPPGSTFDQQVIPPL

SEQ ID NO: 283049 - protein, 106 aa, Glycine max
  Clone ID: PAT_MRT3847_97615C.1.pep
AGAKRGDPKDKGAGDEEMPEQNGAPEARRKDTTKEPGRRNGRTDLPGREPERENQGGKPGRGTTEQSGDPGKGDEGEQETDEKRDKARREERGETRRAPRERSSRE

SEQ ID NO: 283050 - protein, 38 aa, Glycine max
  Clone ID: PAT_MRT3847_97616C.1.pep
WLYNAPWSAFASPMLYTRFKGISNFCIVIYFCFFTLSF

SEQ ID NO: 283051 - protein, 126 aa, Glycine max
  Clone ID: PAT_MRT3847_97617C.1.pep
MIYGTCVTASKSLIFRALVLQKPLNFQVKFSSKCFPTKIRMESNLNHSIEGNNKASRGALVVLEGLDRSGKSSQCSRLVSFLEGQGISAELWRFPDRTTNVGQMISAYLTNTSQLDDHTIHLLFSA

SEQ ID NO: 283052 - protein, 74 aa, Glycine max
  Clone ID: PAT_MRT3847_97618C.1.pep
PTRPDRSLSRICCLFFSFSILIHRGEFISSIWTLYFFLITSRDNMLLFDWFYGNLAFLDLMSHRSLNSFPRSRS

SEQ ID NO: 283053 - protein, 167 aa, Glycine max
  unsure (1)..(167): unsure at all Xaa locations
  Clone ID: PAT_MRT3847_97619C.1.pep
TYSLCKPCFLYRGSDSWGESDGASIQMRLSYSPAAQFFLFLEQWTDXHLAGVLGLLRILIYKVYEDGKTTMFIYEKKASLKEYYGVIFPSTLQLHRXSVMYKKENRKILCATKYTLRDIMRRGKSFVIALEREEQXRTRMEMNNXVVLLNCNHYVCMKCYRNWHARS

SEQ ID NO: 283054 - protein, 57 aa, Glycine max
  Clone ID: PAT_MRT3847_9761C.1.pep
SVQKAKKKYKLKCSYIYGCKHNLRVISTHCYNNNQYFYFGHIYVTLIHTSGLQLLIF

SEQ ID NO: 283055 - protein, 88 aa, Glycine max
  Clone ID: PAT_MRT3847_97620C.1.pep
ACGRTTTGEGEMTGTYSTGVGTLVTPRSTLQVRGLSLITKSTMPTYMSKNTKGWRDSHCDNKFLLQGKAYLFRTYRLQRLQRLKLHLW

SEQ ID NO: 283056 - protein, 103 aa, Glycine max
  unsure (1)..(103): unsure at all Xaa locations
  Clone ID: PAT_MRT3847_97621C.1.pep
MDAADVDGNGSIDYLEIISXTMHRHRLERDEHLYKAFQYFDKDNSGYITRDELETAMTQHGMGDEATIKEIISEVDTDNDGRINYEEFCAMMRSGMPHQGQLL

SEQ ID NO: 283057 - protein, 132 aa, Glycine max
  Clone ID: PAT_MRT3847_97622C.1.pep
EFGTRVNRVQEFKQQHHHDAETEGSNFLSLEKDKENIKSAEAPSPILKILKSEFECLPAYMKGLTSWEDLVVAVDKINSSLSKKTNGCSYFHQDEIPSFELGPKTRSYLLLLVRMNRLVVETIDGLLSYRVL

SEQ ID NO: 283058 - protein, 205 aa, Glycine max
  Clone ID: PAT_MRT3847_97623C.1.pep
MGCQGSKEKKSKTEFTTSYGSAATGSGGGTSYNTVQPPPPPPPPTTTATTTNQVQTSAAPKPQSKASPTVQQKADTRILGKPFDDIKKYYSLGKELGRGQFGITYLCTDNASGGTYACKSILKRKLVSKADREDMKREIQIMQHLSGQPNIVEFKGAYEDRFSVHLVMELCAGGELFDRIIAQGHYSERAASSLCRSIVNVVHIC

SEQ ID NO: 283059 - protein, 526 aa, Glycine max
  Clone ID: PAT_MRT3847_97624C.1.pep
MVARRKKSNTSYGSAATGSGSGSGSGGGYNTVQPSPPTTDQVQASAQTPENRKASPTVQKKADTSIVGKPFDDIKKYYSIGKELGRGQFGITYLCTENSSGGTYACKSILKRKLVSKADREDMKREIQIMQHLSGQPNIVEFKGAFEDRFSVHLVMELCSGGELFDRIIAQGHYSERAAASLCRSIVNVVHICHFMGVMHRDLKPENFLLSTKDDHATLKATDFGLSVFIEQGKVYHDMVGSAYYVAPEVLRRSYGKEIDIWSAGIILYILLSGVPPFWAETEKGIFNAILEGEIDFVSEPWPSISDSAKDLVRKMLTQDPNKRITSSQVLEHPWMREGGDASDKPIDSAVLSRMKQFRAMNKLKKLALKVIAENLSEEEIKGLKAMFANMDTDNSGTITYEELKTGLARIGSKLSEAEVKQLMDAADVDGNGSIDYLEFISATMRPHRLERDEHLYKAFQYFDKDNSGYITRDELEIAMTQNGMGDEATIKEIISEVDADNDGRINYEEFCAMMRSGMPHQGQLL

SEQ ID NO: 283060 - protein, 187 aa, Glycine max
  Clone ID: PAT_MRT3847_97625C.1.pep
GDASDKPIDSAVLSRMKQFRAMNKLKKLALKVIAENLSEEEIKGLKAMFANMDTDNSGTITYEELKTGLARIGSKLSEAEVKQLMDAADVDGNGSIDYLEFISATMHRHRLERDEHLYKAFQYFDKDNSGYITRDELEIAMTQNGMGDEATIKEIISEVDADNDGRINYEEFCAMMRSGMPHQGQLL

SEQ ID NO: 283061 - protein, 170 aa, Glycine max
  Clone ID: PAT_MRT3847_97626C.1.pep
MSKPLLGIAEEEGQSNVTLLVSSSATMESVCLNSSKLKERNYMGLSDCSSVDSSAPSFSDETKSNLNLKATELRLGLPGSQSPERDSDLCLRSSIQFDEKPLFPLHPATDEHHSSSKPAVLGNKRGFSDVMSGFAEEKLLVSSEVNTILPPRPSSNVGLKPSSMLENVGA

SEQ ID NO: 283062 - protein, 60 aa, Glycine max
  Clone ID: PAT_MRT3847_97627C.1.pep
INFLSFFLSSLPLFYSLLGFTSHPLFPFCQSLIFFLFHPRFSTFLDQGALVSSVLNHFFV

SEQ ID NO: 283063 - protein, 423 aa, Glycine max
  Clone ID: PAT_MRT3847_97628C.1.pep
LVIEDGEVVHLKDGGVSILKYENDMGEHGASLSRAFSVRRALSVLEMEVEQINKGNYEHYMQKEQKGQPESLTTTMRGGLIHRGSNKSKSVLLGGLKDHLKTIRRSRRILFIGCGTSYNAALAARPILEELSGVPVTMEIASDLLDREGPIYREDTAVFVSQSGETADTLLALQYALDNGALCVGITNTVGSAIARNTHCGVHINAGAEIGVASTKAYTSQIVVMVMLALAIGGDTISNQARREAIIDGLFDLPNKVREVLKLDLEMKDLAKQLIAEQSLLVFGRGYNYATALEGALKVKEVALMHSEGILAGEMKHGPLALVDENLPIAVVATRDACFSKQQSVIQQLNARRGRLIVMCSKGDASSVCPNESCRVIEVPQVEDCLQPVINVVPLQLLAYHLTVLRGHNVDQPRNLAKSVTTQ

SEQ ID NO: 283064 - protein, 155 aa, Glycine max
  Clone ID: PAT_MRT3847_97629C.1.pep
MSKPLLGIGEEEGQSNVTLLVSSSVIMESVCLNSSKLKERNYMGLSDCSSVDSSAPSFSDETKSNLNLKATELRLGLPGLQSPERDSDLCLRSSIQFDEKPLFPLHPATDDHHSSSKPAVLGNKRGFSDVMSGFAEEKLLGRSEVNTILSPRPFF

SEQ ID NO: 283065 - protein, 204 aa, Glycine max
  Clone ID: PAT_MRT3847_9762C.1.pep
ASISTFSTVSLKTRKQGELIFSAGFFSFKPIEKPNFCNKKQDEFFPNTYPSKPTPEKTKVFKTNPTTKISDKSQSDNKFLAEDFFFPPNPFFPPPLVPNPFQPPPLIPNPFQPPPLIPNPFQPPSPPLIPNPFQPPSPPPLIPNPFQPPPSPPTLFPNPFQPPPSPPPSLFPPFPPLVIPGLTPSPPPPPPTKPIFPPFPPLFP

SEQ ID NO: 283066 - protein, 143 aa, Glycine max
  Clone ID: PAT_MRT3847_97630C.1.pep
CLFTVLLKKFSGDEGERVDVQKLFGYIGLFTLVALWWLIWPLMALGIEPKFTIPHSAKVDEVVLANGFIGSVLSDYFWALCVVWTTPLVATLGMSLTIPLAMVADMVIHGRHYSAVYILGSVQVFAGFVIANLSDRLTKMLGL

SEQ ID NO: 283067 - protein, 246 aa, Glycine max
  Clone ID: PAT_MRT3847_97631C.1.pep
MSNSDATTNGVSNGAIIDAQRQQALAVKKPPSKDRHSKVDGRGRRIRMPIICAARVFQLTRELGHKSDGQTIEWLLRQAEPSIIAATGSGTTPASFSSVSLSVRAAANSLSSPSSTSDHKPQLLSPTPFILGKRIRTDEDSSKDEAVSVGPSLVGPSTPPGLWALPARPDFGQIWSFAAAAAPEMVSVSQQQQASLFAHHHRQQQQQAIGEASAARVGNYLPGHLNLLASLSGGPGNSGRRDDEPR

SEQ ID NO: 283068 - protein, 49 aa, Glycine max
  Clone ID: PAT_MRT3847_97632C.1.pep
GSMTDKVGNPFVDVGQNKISSPVEHANDMRRSGVSMVQQVLTSSNQAQG

SEQ ID NO: 283069 - protein, 57 aa, Glycine max
  Clone ID: PAT_MRT3847_97633C.1.pep
KTYLSCGVSTGVGAAWNIADEHFGSTVAVFGLGTVGLSVPIVVLLINAYFWWLELRW

SEQ ID NO: 283070 - protein, 70 aa, Glycine max
  unsure (1)..(70): unsure at all Xaa locations
  Clone ID: PAT_MRT3847_97634C.1.pep
LTSHQQFXPLTKITTTFSDYKSIQNSSYNEFFICKKKFPLHDISIGRKSDENLNCSCINIQVNSSLSTTM

SEQ ID NO: 283071 - protein, 149 aa, Glycine max
  Clone ID: PAT_MRT3847_97635C.1.pep
GNKIMPGILSRLNATIYCRIREAITRQQGVPTSLYRSSALPLCSLTSSHTLHTKSMITASHSNAMLGDVYAYGLISGRGSVRDFTKPAVGCLRGSVNLRRLQPLYGPLSFGCSTFDANRRIRDSSLLHGSWLKNFSASSSACYSTGGCT

SEQ ID NO: 283072 - protein, 73 aa, Glycine max
  Clone ID: PAT_MRT3847_97636C.1.pep
RSGLQPQFLKFSGLWRQQIAATTSGFLKSPQHQGFEVYETTSPRQLRPQIFTMSRFSETPRQRLQFKTFGRVG

SEQ ID NO: 283073 - protein, 64 aa, Glycine max
  Clone ID: PAT_MRT3847_97637C.1.pep
FFFFFGPKFEVEMVQGKLSASGKRLKTEKFCHLNNQILAYSYLNFILVILCYTRELCVDLTLWF

SEQ ID NO: 283074 - protein, 169 aa, Glycine max
  Clone ID: PAT_MRT3847_97638C.1.pep
ELILRPTQVVIWFPNRRALWLTNRMAHDYNSLLTNYYDLLATYDNLLRDNDDLLAEVAELTDTVLARLTDEILLEQADANGLQEPLPNCLVDSLSEGEGSTATFEACYQEDFSAGKSDVFDSSESPLYSDGDHSALLDTGDSAYVFTPDPSDVSQDDQYNLCQTLLPHY

SEQ ID NO: 283075 - protein, 43 aa, Glycine max
  Clone ID: PAT_MRT3847_97639C.1.pep
ATLVLDICSSVILGFCSFRNFKMDSHIHLSFPLQLVLKGTFSI

SEQ ID NO: 283076 - protein, 143 aa, Glycine max
  unsure (1)..(143): unsure at all Xaa locations
  Clone ID: PAT_MRT3847_9763C.1.pep
HVSQKEYVRPLEELTSIGNVLEVEXKEGLLVPTIDLREIDPEDEDIRXKXRQTLKTAAEDWGVMLFENPVILYELIXRLTKDRQTLFGLAHDEKDKSVLMRSVSYTQGFGSRLANNACAQLERKDYFIHLALPEDKRDLSIWP

SEQ ID NO: 283077 - protein, 104 aa, Glycine max
  Clone ID: PAT_MRT3847_97640C.1.pep
MGSETVASAGESNDMEIDGSLEHKATVNEGSSPSTSVPVLEEPLNFDAFNSAAELEVLGLERLKSELQSRGLKCGGTLMERAARLFLLKSTPLDELPKKLIAKK

SEQ ID NO: 283078 - protein, 66 aa, Glycine max
  unsure (1)..(66): unsure at all Xaa locations
  Clone ID: PAT_MRT3847_97641C.1.pep
THLPTHRIGNMDTSSLYLLWNIILKHHPFIHHPCISSIQQLYINLHFKILHLIIHRITYFYIXNTD

SEQ ID NO: 283079 - protein, 118 aa, Glycine max
  Clone ID: PAT_MRT3847_97642C.1.pep
PSPRSPGYLSGPIRVGPNSGPRNPPALHCSVHDGPVPQRRAPRPSDPKPKFQCEPLINRTSYVTGGNLNPMLKLASSNGVKRTKLESFYAMLCNMVDEAATPKVKGKKNLEAKKGAPA

SEQ ID NO: 283080 - protein, 142 aa, Glycine max
  Clone ID: PAT_MRT3847_97643C.1.pep
QFSPPNFEDASPQNGQTNPSGLNTSRGTKRKRNVVELVEDQYERMNESIMTIAEALKEGNSVSKELHQVAERQVEVAKRQVAVIEKQVEIAEKQLTVIQQTRPRHYSESDVWDLLEELRVTDPFRMKVYNHLCDNEHKKRKL

SEQ ID NO: 283081 - protein, 41 aa, Glycine max
  Clone ID: PAT_MRT3847_97644C.1.pep
DKKEHLSNSVTKCKVNSKQSSYTTSKLQLMYETKFIHDCSM

SEQ ID NO: 283082 - protein, 77 aa, Glycine max
  Clone ID: PAT_MRT3847_97645C.1.pep
RPAARRVRKGAAARRVRKGAAARRVRKGAAARRVRKGTAARRVRKGTAARRGQAGPNEKKCSEGTDGKRQQKRETLA

SEQ ID NO: 283083 - protein, 65 aa, Glycine max
  Clone ID: PAT_MRT3847_97646C.1.pep
GVVKLEFGLDRTMNSSLGSWKPIWPPTNIMRPPVTFGVFYCKNIQRRCQNNTGVKWVLPLPLGCS

SEQ ID NO: 283084 - protein, 55 aa, Glycine max
  unsure (1)..(55): unsure at all Xaa locations
  Clone ID: PAT_MRT3847_97647C.1.pep
RHGGGYYKSHRGDAFGGEWANGQSHWFGIHNLHGGXPAYDGESKWGVKHGLAQDQ

SEQ ID NO: 283085 - protein, 96 aa, Glycine max
  Clone ID: PAT_MRT3847_97648C.1.pep
MASNPKPLTFEEVANHNNKKDCWIIINGKVYDITPFLDEHPGGDEVLVTSTGKDATIDFEDVGHSDSAIEMMEKYFVGKVDTSTLPAKVNHNLPQP

SEQ ID NO: 283086 - protein, 39 aa, Glycine max
  Clone ID: PAT_MRT3847_97649C.1.pep
QAMKISSYHTRENLPTFDSYFITKPSDSLENQKKWDLVS

SEQ ID NO: 283087 - protein, 348 aa, Glycine max
  Clone ID: PAT_MRT3847_9764C.1.pep
RRAAPSVATSPTTPPPSGASCHIPKPPVLIVPKIVPPAQQWRPPTQDEQGAAKEHKNSEWKEREEGVEGEDDDENEEGDKEKWEDIDNNVKEVVAQQEAWRVQDMARINRKHELLVQERSTAAAKNVAVIAFLQQLSGQHQNSTVTQAQLNFPQQPPPQKVTIVQPPPQQAPQPQAPLVLSNSDNMEIQKMNNGHSVVTATVTATATPTPTTTFVAAATAITTTPSSLSSLSSSRWPKTEVHALIRLRTSLETKYQENGPKAPLWEDISAGMLRLGYNRSAKRCKEKWENIIKYFKKVKESNKQRREDSKTCPYFNELEALYKEGSKTQNPFGASFHNMKPHEMMEDR

SEQ ID NO: 283088 - protein, 141 aa, Glycine max
  Clone ID: PAT_MRT3847_97650C.1.pep
MASNPKPLTFEEVANHNNKKDCWIIINGKVYDITPFLDEHPGGDEVLVTSTGKDATIDFEDVGHSDSAIEMMEKYFVGKVDTSTLPAKVNHSLPQPTQAGGAGNQSSGFVVKILQFLLPFLILGLAFALQYYGKKKHASTS

SEQ ID NO: 283089 - protein, 141 aa, Glycine max
  Clone ID: PAT_MRT3847_97651C.1.pep
MASNPKTLTFEEVAKHNNKKDCWIIINGKVYDITPFLDEHPGGDEVLLTSTGKDATIDFEDVGHSDSAIEMMEKYFIGKVDTSTLPPKVSHSLPQPTQTHGAGNQSSGFVVKILQFLLPLLILGLAFALQYYGQKKHASTS

SEQ ID NO: 283090 - protein, 56 aa, Glycine max
  Clone ID: PAT_MRT3847_97652C.1.pep
TTQKGAISKNISYPKLTAAFDIWGNRILHLLVTTLTDTIDINKNTHIIIIRECHQP

SEQ ID NO: 283091 - protein, 48 aa, Glycine max
  Clone ID: PAT_MRT3847_97653C.1.pep
HLFTQLNQTKFYVSFSFFFLYFSIRKLLILNHACFPSFQNITLILIYA

SEQ ID NO: 283092 - protein, 325 aa, Glycine max
  Clone ID: PAT_MRT3847_97654C.1.pep
VEVMLKQNRDATIHWVQVGEKKQPKLLIELLEQKCSFLQGFKGVETFDSDQVLSLHRLEAAYSWSLPLVTLASIVVALPNINRDSVKKLISTLNEGLHFVKFIENNLDKERELFRLRTAAEIVWLGVDLYDKWLDVDLHELSLQDKSPKETLEKLADAAKIRYEKFRAKYNHICIKESPSLWPIKVSASHTMYRICKTALLNHELLRDNSSERLFEALTVMISDILGACLTNLPLVISNKCLNSTIEEREDTVRHAVDILGKTKKIIEMLEKRAFPRVNFCQGTFIEDWRSMHKQNSFLHFVPSSLENDTHTDPLKSNDLYLNVD

SEQ ID NO: 283093 - protein, 88 aa, Glycine max
  Clone ID: PAT_MRT3847_97655C.1.pep
HSFFVHSHFSSSSSHRMTPLFCLKGVVGWWWWWWNQSQAGQIKGQARTSVPARGDFDHSSHPMKSIYYASSTHSFSELLFLDRENEFN

SEQ ID NO: 283094 - protein, 42 aa, Glycine max
  Clone ID: PAT_MRT3847_97656C.1.pep
SVCCSQTPLRIHSHAEQLEVENSKLLATQIPSNSKAKHIHYY

SEQ ID NO: 283095 - protein, 112 aa, Glycine max
  Clone ID: PAT_MRT3847_97657C.1.pep
QYHLVLSSFSPSFPKNQYKYIYKRQIGVLAMDLHQRPLKLHFYSLPVTGAFDPSLQHSNTLRLTRAARDGDYHSLLRPNPSQIQPLEAVTAGVPMRDAWDWGGGGCHRVAWH

SEQ ID NO: 283096 - protein, 170 aa, Glycine max
  unsure (1)..(170): unsure at all Xaa locations
  Clone ID: PAT_MRT3847_97658C.1.pep
MGKDFGRGGGPRKYSYAELTQAANGFKDEHKLGQGGFGGVYRGYLKDXSLMLPFKRVSEGSDQGIKEFASEVSTISRLRHRNLVHLIGWCHAGKKLLLVYEYMPNGSLDIHLFKKQSLLKWTVRYNISRGLTSTLLYLHNEXEHCVVHTYIHSSNIILDSQLNAQLEIFA

SEQ ID NO: 283097 - protein, 46 aa, Glycine max
  unsure (1)..(46): unsure at all Xaa locations
  Clone ID: PAT_MRT3847_97659C.1.pep
KSSAIFESGCGXPAYVEGFQQDIDRLPDPDRTKTEKTCTSCHVHMS

SEQ ID NO: 283098 - protein, 46 aa, Glycine max
  Clone ID: PAT_MRT3847_9765C.1.pep
FCPIFSIGGINFNNLTFFRNLNWVPIKGCNLVVKTRNQNKLFLRIL

SEQ ID NO: 283099 - protein, 56 aa, Glycine max
  Clone ID: PAT_MRT3847_97660C.1.pep
VLDNHSSKSCQIVVRITKLCFFYFVLFSVVVMSYIFYVTKKNVIFSANFEADLLFI

SEQ ID NO: 283100 - protein, 87 aa, Glycine max
  Clone ID: PAT_MRT3847_97661C.1.pep
PNLEEYLGKQVLEAVSLIEVRRHFIEALSSPFGRPVEADAVFCRKATFLAASGVFTFLKQKKYRVTEMLGSNCKIWDLSSTLEVMRF

SEQ ID NO: 283101 - protein, 83 aa, Glycine max
  Clone ID: PAT_MRT3847_97662C.1.pep
LFSRSYLLVITLDVIVRTQLKKSSMLLEYSPYQVIVVDTVELCVRRSLSSITSNLKCELLDRDITNPKSCIMYALTEWVDGGV

SEQ ID NO: 283102 - protein, 84 aa, Glycine max
  Clone ID: PAT_MRT3847_97663C.1.pep
GQGHGAKRERFRSWFPESRAREKFWCLVPQVPNFRVTHGSWDPNTVLFNYHQIGRRTLRFLILGRWDSCNLFFLSGRLTQQAGS

SEQ ID NO: 283103 - protein, 176 aa, Glycine max
  Clone ID: PAT_MRT3847_97664C.1.pep
MTTTKQFEVVGRKKPTETDKNPKVYRMKLFAPNHVVAKSRFWYYLSFLKKVKRTTGEILEVHEIFEKNPNHVKNFGIWLRYDSRSGTHNMYREYRDVTLNGAIDQMYADMAGRHRARRPNISVLGTAVIPAKKSKRQQLWPFINSKIKFKLLHRVPRPAFKRFKTPFRAVAPSAFF

SEQ ID NO: 283104 - protein, 290 aa, Glycine max
  Clone ID: PAT_MRT3847_97665C.1.pep
MKGIDIFCASQASTAICLGMDQPSSSSSISISNTAQFGGRAIDRHNPIITDPRRTPSRDLISPCSSSLSPIDPKPLHDHLQKAKKNSTSKPSGQKKKNASKSHDQKKKSAAGKLTEHITNNYSSKPIDSILRRSWARPPSDLITPPGSSRYLLGDTPSFDCVSSVYDPVLALANVEKEKAQVIHHDETNHSSKPSSSTLPKTDSSDQVVELRVSLHCKGCEGKVRKHLSRMRGVRSFNIDFAAKKVTVVGDVTPLSVLASISKVKNAQFWPEHASVIGSATPETKRTNFI

SEQ ID NO: 283105 - protein, 169 aa, Glycine max
  unsure (1)..(169): unsure at all Xaa locations
  Clone ID: PAT_MRT3847_97666C.1.pep
MSKFHVMLLVLVALLWNSGASEAEECEKRWIHIRKLPSSLNLDLLANCSEYPMLDDLCPFLANHGLGXKTHNHSHSWYRTDPSMLELIFHRRMLEYPCLTQDPLQANAIYLPYYAALDSLRYLYGPEYNSSAKHGLSLFHFLQSDNPQIWNRHMGHDHFLXMARPAWDF

SEQ ID NO: 283106 - protein, 50 aa, Glycine max
  Clone ID: PAT_MRT3847_97667C.1.pep
KSFSIPIDIHSQPILIPIRAQTLGNTPLKTNCLGEIQALKYSTSILNYSM

SEQ ID NO: 283107 - protein, 286 aa, Glycine max
  Clone ID: PAT_MRT3847_97668C.1.pep
MFHRWSNSHQQDQGSSELYAESKIKELKGVIGPLSGRSLTYCTDACFKRYLEARNWNVDKSKKMLEETLRWRSTYKPEEIRWHEVAMEGETGKLYRASFHDRQGRTVLILRPGMQNTTSMENQLRHLVYLLENAMLNLPPGQEQMSWLIDFTGWSITNNVPLKLARETINILQNHYPERLAIAFLYNPPRVFEAFWKIVKYFLDNKTFQKVKFVYPNNKDSVQVMKSYFDEENLPKELGGKSIMSYNHEEFSRLMVQDDLKCAAFWGSDGKLSNHIVNGNSASVLK

SEQ ID NO: 283108 - protein, 294 aa, Glycine max
  unsure (1)..(294): unsure at all Xaa locations
  Clone ID: PAT_MRT3847_97669C.1.pep
MFHRWSNSHQQDQGSSELCTESKIKELKGAIGPLSGRSLMYCTDSCFKRYLEARNWNVDKSKKMLEETLRWRSTYKPEEIRWHEVAIEGETGKLYRANFHDRQGRNVLILRPGMQNTTSMENQLRHLVYLLENAMLNLPPGQEQMSWLIDFTGWSITNNVPLKLARETINIXQNHYPERLAIAFLYNPPXRVFEAFWKIVKYFLDNKTFQKVKFVYPKNKDSVELMKSYFDEENLPKELGGKSIMSYNHDEFSRLMVQDDLKCAAFWGSDGKLSNHIANGQSPAVCNETPPEAC

SEQ ID NO: 283109 - protein, 49 aa, Glycine max
  Clone ID: PAT_MRT3847_9766C.1.pep
FFIQTFTSQLALKIFVKLEETSPFYITLGNPFKPIKETINSFRCFFQPL

SEQ ID NO: 283110 - protein, 251 aa, Glycine max
  Clone ID: PAT_MRT3847_97670C.1.pep
MALIPNSKTSALFHLLLFILGNIAYATVFTLENHCSYTVWPGTLSGNGVATLGDGGFPMAPGSSAQLTAPSGWSGRLWARTGCSFDASGNGKCLTGDCAGGMRCTGAGVPPATLGGVQPSDPAGKGGGKDFYDVSLVDGYNVGVGVRATGGTGDCKYAGCSEDLNAACPAELQVKDGGGEVVACKSACAAFNTAEFCCTGDHSSPQTCSPTLYSKIFKNACPAAYSYAYDDPSSICTCSGSDYVITFCPSH

SEQ ID NO: 283111 - protein, 144 aa, Glycine max
  Clone ID: PAT_MRT3847_97671C.1.pep
EFGTRLKLRPHRQSSAKGPEPITGKLSKRFFGPFQVVERVGKGAYRLQLPVDAKLHPVFHCSLLKPFQGNPPDTAAPLPPTLFDHQSVIAPLVILATRTVNDDDIEVLVQWQGLSPDDATWEKWTELCKEFHLEDKVLPHGPVE

SEQ ID NO: 283112 - protein, 72 aa, Glycine max
  Clone ID: PAT_MRT3847_97672C.1.pep
NSRLFTADIYLLHSLRVYITDSVPHEGALDCLLIQLKHLLAESIPKLEICVLTLGDQDQHMHCYELTLLIAC

SEQ ID NO: 283113 - protein, 128 aa, Glycine max
  unsure (1)..(128): unsure at all Xaa locations
  Clone ID: PAT_MRT3847_97673C.1.pep
QLPAGKFVTFVMSTVPCLRDWLRQYXHARLLIAASDGVELASSNSSSVGDISSPAAYDYILTQGRAWAISITQKSTRNEEISRAFISNGGGMDNNLLYRSSTHGRGLGRFWSHVEGYKGPLLILIAAS

SEQ ID NO: 283114 - protein, 76 aa, Glycine max
  unsure (1)..(76): unsure at all Xaa locations
  Clone ID: PAT_MRT3847_97674C.1.pep
KRYIENETHKLDAEKQEEIKKHIEGETKXVLAKSKDLQFFVGESVGEGACEGVGXYKDGGEDTTXVYFGYVLKEGK

SEQ ID NO: 283115 - protein, 63 aa, Glycine max
  Clone ID: PAT_MRT3847_97675C.1.pep
HCTLWYGYEGKLKYLQRMAYTNTIVYPWTSIPLLAYCTIPAVCLLTGKFIIPTVSTTQHNYKG

SEQ ID NO: 283116 - protein, 104 aa, Glycine max
  unsure (1)..(104): unsure at all Xaa locations
  Clone ID: PAT_MRT3847_97676C.1.pep
LXCXFLSFPXLFLAXXXXLLLXLXVSXLLFXRFLGXXFXPXLXFXXSAXXXLFPLXXCCXXXSXVLXXAXXWWXLSLLXGLXCLGGLXAXXXXXXXXLLXXCLL

SEQ ID NO: 283117 - protein, 84 aa, Glycine max
  Clone ID: PAT_MRT3847_97677C.1.pep
ASSSYLDRTVQGPVTSNRACMSGFSTCLHKPSFCELSATTTTVHHIARQLVSSVYGRPRNSQLQLSSPANAPTHCQFGRVLIPC

SEQ ID NO: 283118 - protein, 491 aa, Glycine max
  unsure (1)..(491): unsure at all Xaa locations
  Clone ID: PAT_MRT3847_97678C.1.pep
NPRHHPFSSSQNTLLVAPSAPSIPIPRVRVSIVPDLLHYLNXSWTQFXTAEAKRQLXGFHMLDENHDWHLPADTSSPAMSCLVAFAIGITRYNVGDGFHVIAAHTDSPCLKLKPKTAXCKWNYSMVNVQTYGAGLWYXWFDRDLSVAGNVILRTGHNSYVHKLVXVDRPILRIPTLAIHLDRTVNLDGFKPNLETHLLPLLSMKPEDTSLESYSKEKNSALASKALHHRLIMQILLDELNSDLDDIVNIELYLCDTQLSCLGGGNNXFIFTDRLDNLASSYCSLRALIDSCESPGDLASENAIRMVALFDNEEVGSGSVQGAGAPTMFQAMRRIVGDLTNNYVSEXLFERTIRQSFLVSADMAHGVHPNFMDKHEELHRPKLQRVLVIKHNANQRYATSGITPFLFKEAGKIHNLPTQEFAVRNGMGCGSTIGPILASGVGIRTVDCGIAQLSMHSIREICAKEDIDIAYKHFKAFYQSFSSVDKMLTVDT

SEQ ID NO: 283119 - protein, 155 aa, Glycine max
  Clone ID: PAT_MRT3847_97679C.1.pep
PPKTGSSFSPRLCPKFPWQTSPFWGPLLFMPNRVPSPGDLPGANGPTKWKPPLLLGGPIPMLRATPFLQKVMVFPAYSLLFSLRLFHGGKNFGPFPQKIYLFHRGLFSFTIICSFDTQLKKTQKKNKKKKKKNKKKQKKKKTKKKKKKKKKKKKK

SEQ ID NO: 283120 - protein, 118 aa, Glycine max
  Clone ID: PAT_MRT3847_9767C.1.pep
FLLFFKPTTSLLFLFFFLIISVTSLTVPPRGGAPLDSDDDIDSLTYLWPLPAEYTFGVDALSVDPALTLSVAGNGGGSAILRAAFDRYRGIVFKHTGVGFSFFRKLRERLVSSDSAFD

SEQ ID NO: 283121 - protein, 138 aa, Glycine max
  unsure (1)..(138): unsure at all Xaa locations
  Clone ID: PAT_MRT3847_97680C.1.pep
QSFLVSADMAHGVHPNFMDKHEEXXRPELQKGLVIKHNANQRYATSGITSFXFKEVGKIHNLPTQEFAVRNDMGCGSTIGPILASGVGIRTVDCGIAQLSMHSIREICGKEDIDIAYKHFKAFYQNFSSVDKMLTVDT

SEQ ID NO: 283122 - protein, 58 aa, Glycine max
  Clone ID: PAT_MRT3847_97681C.1.pep
EKLFHFISDPASWARSFFSLPLFKLALLSPTPNKQSYFIANSILVFTLFGYFTSEQNQ

SEQ ID NO: 283123 - protein, 72 aa, Glycine max
  Clone ID: PAT_MRT3847_97682C.1.pep
QKTYQNMKKLRLSNSVSQQKPKSGFYIKDFKGKHKLSNSNKKNSTTNHTHTKQLQLQLKTNRVYVWFRQCVD

SEQ ID NO: 283124 - protein, 92 aa, Glycine max
  unsure (1)..(92): unsure at all Xaa locations
  Clone ID: PAT_MRT3847_97683C.1.pep
AKEMVKNKRLRWAVXSNKKARVGVLPRNAKDEKLIRWIEXPSXDICHNGNAREEEDFFVESRCRLQKQNLESAGGREKEKTENRANELKEMR

SEQ ID NO: 283125 - protein, 90 aa, Glycine max
  unsure (1)..(90): unsure at all Xaa locations
  Clone ID: PAT_MRT3847_97684C.1.pep
XSEHGRVYHNHEEEAKRLXEXFKNNLXYXRXMNANRKSPHSHRLGLNKXADITPQEXSKKYLXAXKDVSQQIKXXNKXMRKXXYSCDHXX

SEQ ID NO: 283126 - protein, 84 aa, Glycine max
  Clone ID: PAT_MRT3847_97685C.1.pep
SVYEMSESLSRAKSNVHWHFAVSLIRPITKHVYTSFDIHLVEFSHRFMNIGWYIPLTASIFSVSTGLLARIYLEMRESLCMYLE

SEQ ID NO: 283127 - protein, 252 aa, Glycine max
  Clone ID: PAT_MRT3847_97686C.1.pep
KVGHRGGATGFSLFSRGSSQSSLLFCDTDPLLGSSSSLWILSLMGSSDRLFNRQRSLHEILGGGQVADLILWRRKNLTVGILLVTLAVWVVFERSGYTLLSLVSNVLLLLIVILFLWAKSAAILNRPAPPLPQLHLSEEMANEVKTFIRTRVNDLLSVSQDIALGKDSRLFLKVAAYLWIISIIGGLTDFLTLAYTSLFIVLTVPAIYERYEDYIDKYILKGYRKLCLLHLKINEQYVNKVHNWILEKKKLS

SEQ ID NO: 283128 - protein, 44 aa, Glycine max
  Clone ID: PAT_MRT3847_97687C.1.pep
CLAGFLGKARPSCAEVHPWPLDINRAHKIFFFRPVKKKKKPRPP

SEQ ID NO: 283129 - protein, 85 aa, Glycine max
  Clone ID: PAT_MRT3847_97688C.1.pep
TYLVFSFFARTERGVASEETQRKKKKRDPGVAHPGKTLWKTKRAPCLKPARDKNMLSGGGKKKRPFVKGAQGEKFTWPHQTCEKQ

SEQ ID NO: 283130 - protein, 158 aa, Glycine max
  unsure (1)..(158): unsure at all Xaa locations
  Clone ID: PAT_MRT3847_97689C.1.pep
MDTLRSIPMDGTFNQLRPFVGXDEKVXSKVYSFDLKSATDRWPLSLKTHLIRTLFGKSVGDXFRCNLQQIYEVPFLRSVRGVVFFRVGQPLGFLSSWPLFTLTHHLVMFYCAEKVYPGQRFTRYAILGDDVCIADENVASLYRQTVNDLGLAIRKGVR

SEQ ID NO: 283131 - protein, 52 aa, Glycine max
  Clone ID: PAT_MRT3847_9768C.1.pep
GRGTRPPQRQGCKKTTERDGLVNKVYAQTCAVSPPDARSIIPSHKTLSHIMK

SEQ ID NO: 283132 - protein, 57 aa, Glycine max
  Clone ID: PAT_MRT3847_97690C.1.pep
TVHLKRPLIHKTKLYNPCKTIFYTIKALHMAVTSLQTISIEKTFRPSNLDHFVMNAI

SEQ ID NO: 283133 - protein, 476 aa, Glycine max
  Clone ID: PAT_MRT3847_97691C.1.pep
DDDDDDDDDEVEYEVHVVDKKVVDGDNNDGNKAKEHAAFRTRRPGSRNPLEVAKEIQILFQRASDSGAQIAKILEVGKLPHNRKHAAYQASCKMLQVVAPSLSLVSSQPSTSKDAESASAANMDFNVDLTTGARNLSSTLQKLLLWEKKLFNEVKAEEKMRVMHDRKCHRLKRLDDRGSDFHKVDSTRTLIRNLSTKIRMAIQVVDKISMTINKIRDEELWPQLKELIQGLTRMWKSMLECHHDQCEAIREARILGSIGSRKKSGDSHLQATKQLEQELINWTFQFSGWISAQKGYVRALNNWLLKCLLYEPEETPDGIVPFSPGRIGAPQIFVICNQWSQALDRISEKEVVDSMHVFTMSVLQIWEQDKLEMHRQVMKNKDLERKVRNMDRDDQKLQKQIQALERKVVLVSGEGKGLSVSENIIYQSDKSSSLQASLQRIFEAMERFTDESVRAYEELLQRSKEESAARNHERVS

SEQ ID NO: 283134 - protein, 139 aa, Glycine max
  unsure (1)..(139): unsure at all Xaa locations
  Clone ID: PAT_MRT3847_97692C.1.pep
ALMKAQPPFFNAWKAKLWFRFFCLSGFVPMYFNDCPRPAFFEGLGLNPKEFAMHVFIGANRPTVRVFPPVFVVENPEFNRKLARMVEINQKIFSVGGSDDIPGVKNFKRVPLGAALGFELLAPYFMPPIXSGFVNLAEF

SEQ ID NO: 283135 - protein, 140 aa, Glycine max
  Clone ID: PAT_MRT3847_97693C.1.pep
WRHSFTQIVPSQPVQVHLINSVMAHNHYVENAEAMLMIMENQGSLLRNKVKAYVMGKLIKPSKPIASAIVFIFAFVLMHCVYLKEEVEIWNESNNEVWFVGVKSHDEKGLSAILKKIGIFLTISLALCTMWANQNMIVNP

SEQ ID NO: 283136 - protein, 53 aa, Glycine max
  Clone ID: PAT_MRT3847_97694C.1.pep
LLLLKPYGACLHHKLNILEAPCRERRKTDERTALIGFDSLASIIGEGWGSCKF

SEQ ID NO: 283137 - protein, 43 aa, Glycine max
  unsure (1)..(43): unsure at all Xaa locations
  Clone ID: PAT_MRT3847_97695C.1.pep
KIYSLFKMCFRYSFVVLWTPHNFAXKSCIYIYTCLYVMLATHX

SEQ ID NO: 283138 - protein, 108 aa, Glycine max
  Clone ID: PAT_MRT3847_97696C.1.pep
LFFWGGFFFFFFFFFVFFFFFFFFLFFQEKKANRNFFNPREKGGSIKKNPKPQRGGTKFGLPITNKGGWGRENLTLWREKGTILSLIPPQPRFFFKSPLFWGLENPES

SEQ ID NO: 283139 - protein, 104 aa, Glycine max
  Clone ID: PAT_MRT3847_97697C.1.pep
PLNPGFLLLGPTSVGRFLPLFQGPPVKGHQLFPVSLVERKTPLGPHTQTPFPRGLAGSFIPLAPPVFLFETGPLAPPHFFWFAPSFGPPGFSLFSSGLFFFWNF

SEQ ID NO: 283140 - protein, 248 aa, Glycine max
  unsure (1)..(248): unsure at all Xaa locations
  Clone ID: PAT_MRT3847_97698C.1.pep
MGRDGEIDGGVRRRGCTFRRNDFFPEESFKSWGNYARAVLETPWRLKDRVVTRSEDQTELVEMKARSNHEMKKTLNWWDLMWFGIGAVIGSGIFVLTGLEARTAVGPAVVLSYVVSGVSALFSVFCYTEFAVEIPVAGGSFAYLRVELGDFVAYIAAGNILLEYVIGGAAVARSWTSYFATLCGKHPDDFRIIAHNMNPNYGHLDPIAIXVLIAITILAVYSTKGFFIFNFICHNLHLIXIXFIIIAG

SEQ ID NO: 283141 - protein, 133 aa, Glycine max
  Clone ID: PAT_MRT3847_97699C.1.pep
MERTEFTLLFLVTCCYLLSLFPTALEAEDAITPPQTISGYQTLVSPSQNFELGFFSPGNSTHIYLGIWYKHIPKQTVIWVANRDKPLVNSGGSLTFSNNGKLILLSHTGSVVWSSNSSGPARNPVAHLLDSGN

SEQ ID NO: 283142 - protein, 71 aa, Glycine max
  Clone ID: PAT_MRT3847_9769C.1.pep
MLLYFLWFRIFDDLRNQQASSLYEYSFSEHTLTVTDVVIGNGGCNAIIVSASKDRTCKVCLLFLCGGAVEK

SEQ ID NO: 283143 - protein, 142 aa, Glycine max
  Clone ID: PAT_MRT3847_976C.1.pep
MGSKTKTFTFEEVAKHNHRKDCWIIVKGKVYDVTPFLDDHPGGDEVLVTATEKDATTDFEDIGHSDSATEMMEKYFVGEVDTNTLPAQVTSSSSVRPPTQAPVYNNQSSGFVVKILQYIVPLLILAFAFGLQYYGKKSKSEN

SEQ ID NO: 283144 - protein, 34 aa, Glycine max
  Clone ID: PAT_MRT3847_97700C.1.pep
YTSSKTTKGFPNPPHIYRRRSLKRNSKASSTHIF

SEQ ID NO: 283145 - protein, 68 aa, Glycine max
  Clone ID: PAT_MRT3847_97701C.1.pep
HSLFNAPSPRSPAVAATRSPSHMPHHLRVSCREVAFVAAVTYIENTGIVFQGYTSDQRRAASLPATDD

SEQ ID NO: 283146 - protein, 51 aa, Glycine max
  Clone ID: PAT_MRT3847_97702C.1.pep
ASVSSSIYRHIALTIILIASFGHAAWQRGSPQTRYITGASSHEVIHAYDES

SEQ ID NO: 283147 - protein, 87 aa, Glycine max
  Clone ID: PAT_MRT3847_97703C.1.pep
TEVKKTHIFGGLNPNWIQLKGPPYGKPGPLKISKKTKHNFQDPKQQKVRHPQAKKGPPTLGFLEKKTRDNKRGGGKKTGGGDPLGTQ

SEQ ID NO: 283148 - protein, 105 aa, Glycine max
  Clone ID: PAT_MRT3847_97704C.1.pep
FGPLYIPSLTLSSSLTPASPNGDKKPRRVSPHLLPLLIHQRCEEIKMSKNKASGLGVEEVRGCAIGEELKFFKSSTSEHNIKLELGIGLIKQPEKLDLELRLGHC

SEQ ID NO: 283149 - protein, 47 aa, Glycine max
  Clone ID: PAT_MRT3847_97705C.1.pep
LVYLLVIYNSVIPDFYVSSSPKFMIQRNNSVSRVCLSPLFSFIVPCC

SEQ ID NO: 283150 - protein, 44 aa, Glycine max
  Clone ID: PAT_MRT3847_97706C.1.pep
IPKKDSLQGISLVLGICTRNGITNRSQNQINPVNIQNKRCIQLS

SEQ ID NO: 283151 - protein, 140 aa, Glycine max
  unsure (1)..(140): unsure at all Xaa locations
  Clone ID: PAT_MRT3847_97707C.1.pep
AKIPASRKIGSMRLDDWVLCRIYKKKSMVKALEHKEAHPEVQIANLAPANHDVEQKMMNLPRTWSLTYLLDMNYLGPILSDGSYCSTLDFQINNXGLDPFVKSQPVEMNNYVADSGKYQVKQSSTIDQPIYVKQMYDLLG

SEQ ID NO: 283152 - protein, 163 aa, Glycine max
  Clone ID: PAT_MRT3847_97708C.1.pep
MLSLSVASPSSSTISFLPKPFNGIQLRRTATCSIPPTKRSSFVPVVVMSKRTEELKEIRQMTTERINEEVVDLKGELVMLRLQKSARNEFKSSDFVSVSIDEHIARMLTVKREREIEEGINKRLSRKLDKKWKKSIVVRPPPSLKKLREEEAAAEAAETEKAA

SEQ ID NO: 283153 - protein, 191 aa, Glycine max
  Clone ID: PAT_MRT3847_97709C.1.pep
RASSPPLVVNIEDLQLHCVVPPSRQQEAAPVVEDDPVVTEDLHAHAEEAVDDFEGLPGGLRDPSVLTDYGDHVAVILWNGESPERKLELRQYNVMGHTYAYHGYKIFIRVNDIYDEVPLSSDTDQRGWCDNLDMFKPFLHRLRVQCYHLKILTTGTKIHEVMEDCLRIARGVTVDGNVYVRSRRRQHTDQP

SEQ ID NO: 283154 - protein, 71 aa, Glycine max
  Clone ID: PAT_MRT3847_9770C.1.pep
SSLELILTKQEFFAVLPLNAFMKTTYFYLILMSWMIGPCSCEQLILKQCINCIGQMAAILFSPFPDKAKLS

SEQ ID NO: 283155 - protein, 383 aa, Glycine max
  Clone ID: PAT_MRT3847_97710C.1.pep
MVALFSSSSLLEVRASSPPLVVNIEDLQLHCVVPPSSSARRQQEAAPVVEDDPVVTEDLHAHAEEAVDDFEGLPGGLRDPSVLTDYGDHVAVILWNGEERPELKLSSHGRKVQKFGRHVPEIEGLVAATGLSPLIPCAFHSFETLHVDEAILMLVELLEVPGEEARAETIQCHGAYIRLSWLQDIYQSKCEAEHWTVAARAYLLHFLGCTLFANKSCWIYEHFSSIAKCLTDPDYDEMSPRACRWIATKASSKSLPASRYQKRLDGLTIVDVCWMPYAQPVDLARHPPVTQDDTYVEPHIPEVPVAPAAAPTHAPSDEEQPRHAMEACQEIAERFERLLNLRIVNAGTKIHEVMEDCLRIARGVTVDGNVYVRSRRRQHTDQP

SEQ ID NO: 283156 - protein, 159 aa, Glycine max
  Clone ID: PAT_MRT3847_97711C.1.pep
GSSPNAADVPTLLGYGSFSLLNVDRKTADKLVKPPPLYMRWPHMKANQVQGLSLREIGGGFTKHHRSPSIRSACYAIAKPSTMVQKMQNIKKLRGHRVAVYCAIFDGSGRYVISGSDDRLVKIWSMETAFCLASCRGHEGDITDLAVSSNNALVASASN

SEQ ID NO: 283157 - protein, 53 aa, Glycine max
  Clone ID: PAT_MRT3847_97712C.1.pep
ISIKKCGIESHRDDKSVMDNYFTNGIKWISMMSNWINITSNNILVIKSIHRPP

SEQ ID NO: 283158 - protein, 81 aa, Glycine max
  Clone ID: PAT_MRT3847_97713C.1.pep
DSFLREILGHLDPIVLTENIFSLLFILFRLYTIFRNTHIVHHCPSLQILGSYLRMLSIHRYKLVYDKSSVIPRIYHSFISF

SEQ ID NO: 283159 - protein, 103 aa, Glycine max
  Clone ID: PAT_MRT3847_97714C.1.pep
ELEAVSIFTINTICLSLSGLTLRGFIDWPLEILNIEPLQNSVFFLKRFIQNHWLCKKKKKKKKKKKKKKKKKKKKKKKKKKIKNKKKKRNTEKNNDKGGPHHK

SEQ ID NO: 283160 - protein, 67 aa, Glycine max
  Clone ID: PAT_MRT3847_97715C.1.pep
YFWDYPIHLQIDFSYVIFFFFSEFSLFRFFLFQVSNYIHFNCKLDSYSFTFGTTGEYSCTTLCWSRK

SEQ ID NO: 283161 - protein, 136 aa, Glycine max
  Clone ID: PAT_MRT3847_97716C.1.pep
MSFHNRAFWMGKSPEGLNDGDMTKDSSRIESKRAHQWFMDDPEVDMFPNKKQAVEAPNNLLSGMLNSNISLWGNSSGFHSLNGHFTEQLFAPDAATMSFEDTNTPSVSIDDKLSVERKDNVDRFGSESSFGLSIST

SEQ ID NO: 283162 - protein, 44 aa, Glycine max
  Clone ID: PAT_MRT3847_97717C.1.pep
KLTIYTILLISVLLYITHTCTTSKWQHHQDNCHKQLQRVNLTHC

SEQ ID NO: 283163 - protein, 61 aa, Glycine max
  Clone ID: PAT_MRT3847_97718C.1.pep
HRTRWRQNWGVNEGSMNLTRKRASITVAVNSNRKSNEATITYLHILNAITLHLSATIIQTV

SEQ ID NO: 283164 - protein, 192 aa, Glycine max
  Clone ID: PAT_MRT3847_97719C.1.pep
MESKDPPNPPPQNNPFIFTPNSMLQNPNWDPQEQSGLCDIDWGNLFSAQNGLLLNGDAKDEIECASSFSFVAQNKGVCEEEKGNKEKRKGGRMKKTTRVPRFAFQTRSADDILDDGYRWRKYGQKAVKNNTYPRSYYRCTHHTCNVKKQVQRLSKDTSIVVTTYEGIHNHPCEKLMETLTPLLKQIQFLASL

SEQ ID NO: 283165 - protein, 35 aa, Glycine max
  Clone ID: PAT_MRT3847_9771C.1.pep
RHAYAKKLGASKKTSTSHFHHNVPSYLDHKPHLSR

SEQ ID NO: 283166 - protein, 216 aa, Glycine max
  unsure (1)..(216): unsure at all Xaa locations
  Clone ID: PAT_MRT3847_97720C.1.pep
FGSSGSRHNGAVWARPLFKDRRKFPKMAXDPLLQGRYPMRGLYQALAVAAMCLQEQAATRPLIGDVVTALTYLASQTYEPNAANQSNRVGPSTPRIRDDRRSMADGVDSPDRRLGSPSTHRNSPDFRKRDSRDPSAATELGRIDIGGGSGRKWGLDDNERQESQRDSPVNTARTRETPWNRDLDRERAVAEAKVWGENWREKKKANAMGSFDATND

SEQ ID NO: 283167 - protein, 45 aa, Glycine max
  Clone ID: PAT_MRT3847_97722C.1.pep
KILIIINLIALQLERNLFTSVFSCNTHFNRFQVVTESEVSDEGSI

SEQ ID NO: 283168 - protein, 204 aa, Glycine max
  unsure (1)..(204): unsure at all Xaa locations
  Clone ID: PAT_MRT3847_97723C.1.pep
TPLFVFTASVCSLFFLLLLCLRKRKRTTPSSNPPHPFSYPVLRRATNSFSTRLGHGGFGPVFSGTLAGDPVAVKLMDSASLQGEREFHNELLFASRLRSPLVVPAIGFSSDPKRRRFLLVYHLMHNGNLHDALLRRKTPHLTLWKNRFSIILDVAKGIHYLHSLEPPIIHGDIKPSNILLDNSFSXKLADSGLARLKSEIERFK

SEQ ID NO: 283169 - protein, 261 aa, Glycine max
  unsure (1)..(261): unsure at all Xaa locations
  Clone ID: PAT_MRT3847_97724C.1.pep
GLPNGVVPENGLDRRAGKKHKRKNSSRQVDGKFEPVSSGQENIEDTHTDYHLREQFKLNSNQDVNNVWQNNGSKVMGELQVEDAEEERFQADLKMAVRQSLDTYQARGNXTFCFQFKNEDSVDCLPVEDSTDNVNGATLLGTGLKNEVGEYNCFLNVIIQSLWHLRRFREEFLGRSRSEHDHVGNPCVVCALYEIFTALDTASKDSRREAVAPTSLRIALSNLYPHSNFFQEAQMNDASEVLAVIFDCLHQSFTRGSSVSD

SEQ ID NO: 283170 - protein, 76 aa, Glycine max
  unsure (1)..(76): unsure at all Xaa locations
  Clone ID: PAT_MRT3847_97725C.1.pep
AQXNLLSNDGXSSXFGTTLLEDEXXPFGYFFKILPPRFNHYARYTPLTYDEILKFFCTFSEEKVPLGIPFKILHLF

SEQ ID NO: 283171 - protein, 76 aa, Glycine max
  Clone ID: PAT_MRT3847_97726C.1.pep
CALCGSSLLLAMPLHLVHPPPLVLLSAPVRFLEITDFPWSSPTRGHTRSGLEVRTFDSSNDIELMNTKVGSGGGDL

SEQ ID NO: 283172 - protein, 225 aa, Glycine max
  unsure (1)..(225): unsure at all Xaa locations
  Clone ID: PAT_MRT3847_97727C.1.pep
MGSEEISTSLCEDIPNLLSSFVDTFVDFSVSGGLFLPPPPPPPPLPTRLPSPPRLVAIGDLHGDLEKSKEALRLAGLIDVADRYTGGSATVVQIGDVLDRGGDELKILYFLEKLKREAARRGGRIITMNGNHEIMNVEGDFRFATLPGVEEFRVWWEWFEIGNKMKTLCHGLENPKDPMEGIPSSFRGVREEFHDGFRAPVAALRPNGPIAKRFLSXSVTVLVVG

SEQ ID NO: 283173 - protein, 53 aa, Glycine max
  Clone ID: PAT_MRT3847_97728C.1.pep
DPGKISLVLSIKRIFFIHNTQLSTLYAYPPVYYIGLAKHSKGRESIYREIFIF

SEQ ID NO: 283174 - protein, 138 aa, Glycine max
  Clone ID: PAT_MRT3847_97729C.1.pep
AKALARGKTLLENDQLCIEQRQGRVFEGWNEGKIYFPPTYKYSNNSDRYAGDDRRSKQKRRTPAWCDRILWYGRGLHQLSYVRGESRFSDHRPVYSMFLAEVESVSCNQIKKSASSRIEVVELFPHSHCYSYTDMNYF

SEQ ID NO: 283175 - protein, 80 aa, Glycine max
  Clone ID: PAT_MRT3847_9772C.1.pep
GVVNFWMWLYDNLNVLVYDAYVLKMDEDQWRYDFAMSQEVHMDYDYDNQEECGVNEPHVDCSNAFNTSQVIIDNLSHWLN

SEQ ID NO: 283176 - protein, 55 aa, Glycine max
  unsure (1)..(55): unsure at all Xaa locations
  Clone ID: PAT_MRT3847_97730C.1.pep
NTNXLYXEENVCXXNAXXMMLLRPKAFLLLSESXPIISFFTYFRKCYFYCXLDGY

SEQ ID NO: 283177 - protein, 60 aa, Glycine max
  Clone ID: PAT_MRT3847_97731C.1.pep
GSVFDVSANGTARTNARGRRELMRGKERCQVGEGRRCEWKGGGPSRTSGHVRGFDNWFEN

SEQ ID NO: 283178 - protein, 41 aa, Glycine max
  Clone ID: PAT_MRT3847_97732C.1.pep
RAQTQPDFDKKTLPQSAGSARDKHPLTKQWDLEVHIKNSLL

SEQ ID NO: 283179 - protein, 60 aa, Glycine max
  Clone ID: PAT_MRT3847_97733C.1.pep
VADVIYKASCSRPTLFVVLKVHSHLSLRYAVPASCSFGFCFRASMQINGCGLMNKLLCGV

SEQ ID NO: 283180 - protein, 44 aa, Glycine max
  Clone ID: PAT_MRT3847_97734C.1.pep
AIVRNSFEGYNAPVRQHLLAYTVAIRFKRNLGEVWHRVNSSPRF

SEQ ID NO: 283181 - protein, 126 aa, Glycine max
  Clone ID: PAT_MRT3847_97735C.1.pep
GLGHRQTSITKPTTQTHKRGKGGTTQNTKIGFPKGAKNKRGELSRGKLGNEGARANRTKVPGSFTGREKNFFIFFLTGLGNKKGKQGGAPNKGGLVLGTLIGKNQPHPFNSKGGTNQAGGGGRLFF

SEQ ID NO: 283182 - protein, 258 aa, Glycine max
  Clone ID: PAT_MRT3847_97736C.1.pep
MRKDRFQKPQKVESIVKEEGEMSDNEEVYEQFKEVKWMEWCQDVMVEEMKTLKRLHRLQQTSANLPKEKVLSKIRNYLQLLGRRIDQIVLEHEQEPYKQDRMTVRLWKYVSTFSHLSGERLHQIYSKLRQEQDEAEVGPSHTNGSVSVSFSRNGNPFRFHMERQRGLKNMATYQMPEPVDNTGKSEAWKRRRRTESDNHFQGQPPPQRTLSNGIRITDPNSLGILGAGPSDKRFASEKPYRTQPGGFPSRQGFSSGIK

SEQ ID NO: 283183 - protein, 52 aa, Glycine max
  Clone ID: PAT_MRT3847_97737C.1.pep
MIYWQIRSMEHMIEHETLPLNKEKQLIREIKQLKQNREELSSNMKRPDPSQQ

SEQ ID NO: 283184 - protein, 63 aa, Glycine max
  Clone ID: PAT_MRT3847_97738C.1.pep
RREKGIPLNAMVGEGTPPLKVSNLTQYCNNQKTFKKKSLSFLNFFTHNLSQMLKQTALFFTLF

SEQ ID NO: 283185 - protein, 75 aa, Glycine max
  unsure (1)..(75): unsure at all Xaa locations
  Clone ID: PAT_MRT3847_97739C.1.pep
VGVYGLGKKLFNSKKGPPTFXQPQMTLEKLFTYGNKLVPKQKNVKKVPLGGKDFKKGALGNANQDGINRGTFFPF

SEQ ID NO: 283186 - protein, 57 aa, Glycine max
  Clone ID: PAT_MRT3847_9773C.1.pep
WYNFYGLEREHAHCPWLHGSMLEMVNQWRWNLYGILNYYYVLILTFGFKRHFCCTDI

SEQ ID NO: 283187 - protein, 60 aa, Glycine max
  Clone ID: PAT_MRT3847_97740C.1.pep
FTTKKKKKKKKKKKKKKKKKKKKKKKGEQFKGSQNLKNKEYKKIKLKIKEGGPFLRAPVF

SEQ ID NO: 283188 - protein, 84 aa, Glycine max
  Clone ID: PAT_MRT3847_97741C.1.pep
SRRQVDSLLRRALPRWQNKALGRVITCDFLLLYKIVAELEREDLFKQHLQSLRPLTGVSEREDAHFHLIESNGTMNNRLHNHGS

SEQ ID NO: 283189 - protein, 77 aa, Glycine max
  unsure (1)..(77): unsure at all Xaa locations
  Clone ID: PAT_MRT3847_97742C.1.pep
VITLLACLLMRVTSLPRVLTWNFELFFYTHQLYAGLIVXMALHVXDYEHTMXAGRIFLYVLDRQLEFCLSLMTVNVI

SEQ ID NO: 283190 - protein, 79 aa, Glycine max
  Clone ID: PAT_MRT3847_97743C.1.pep
PMDYLRTKDISWSYYQKILYIKGLHVISFDSKRCLLESNTRAYERRPVGCLLFVEEIPGGYGKVLKYFIGTPRAQKWVG

SEQ ID NO: 283191 - protein, 91 aa, Glycine max
  Clone ID: PAT_MRT3847_97744C.1.pep
FKNKKAEVSPPPKPNVVGLGSPNKKRCFPPSLVSEPPSFGFCQYPWVWGKNQSPWVFKFVHKKVFMTKGIWYPLLFITFFFPGVYSAGVPL

SEQ ID NO: 283192 - protein, 51 aa, Glycine max
  Clone ID: PAT_MRT3847_97745C.1.pep
QFDARQYDAKMNELLGTDGQDFFTSSDEVCDSFDAMGLQENLLRGIYAYGF

SEQ ID NO: 283193 - protein, 42 aa, Glycine max
  Clone ID: PAT_MRT3847_97746C.1.pep
SSSPSLCVPIIPDMSVWPKQQVHTCSYQAASRIPLVAVFSNA

SEQ ID NO: 283194 - protein, 74 aa, Glycine max
  Clone ID: PAT_MRT3847_97747C.1.pep
LPQCSVQMVIVLSQCSGFGTSTSVTPLHPIQPHPDSWCVSSGISAVQFHRSTPFSSLMSRKCRMLFYKLDRVNP

SEQ ID NO: 283195 - protein, 64 aa, Glycine max
  Clone ID: PAT_MRT3847_97748C.1.pep
MSTKQGGKAKPLKKPKSDKKDYDEIDVANIQKKKEEEKALKELKAKAQQKGSFGGSGLKKSGKK

SEQ ID NO: 283196 - protein, 555 aa, Glycine max
  Clone ID: PAT_MRT3847_97749C.1.pep
MDLHRRPPPAADDGAIHPKKRRDTSSPKASDALPLPLYLTNAIFFTLFFSVAYFLLHRWRDKIRSHTPLHVVTLSEIAAIFSLIASFIYLLGFFGIDFVQSFISRASHDSWDLDDAVTAPSPAITKLPSRDTSIIFSEDDEEIVNSVVEGVTPSYALESRLGDCGRAAAIRRGALQRLTGRSLEGLPLEGFDYDSILGQCCEMPVGYVQIPVGVAGPLLLDGFEYTVPMATTEGCLVASTNRGCKAIYASGGASSVVLRDCMSRAPVVRFSTAKRAAQLKFFLEDPLNFDTLSLVFNRSSRFARLQGIQCAMAGKNAYLRFTCSTGDAMGMNMVSKGVQNVLDFLLNDFPDMDVIGISGNYCSDKKPAAVNWIEGRGKSVVCEAIIKEEVVQKVLKTNVSALVELNMLKNLAGSAVAGALGGFNAHASNIVSAIFIATGQDPAQNVESSHCLTMMEAVNDGRDLHISVTMPSIEVGTVGGGTQLASQSACLNLLGVKGASKESPGSNSRLLATIVAGSVLAGELSLMSAIAAGQLVNSHMKYNRSSKDVTKISSS

SEQ ID NO: 283197 - protein, 41 aa, Glycine max
  Clone ID: PAT_MRT3847_9774C.1.pep
FYTLKRLLFRLKQFIFASIQEMRTSKLKPTVLIKHHQIKMA

SEQ ID NO: 283198 - protein, 82 aa, Glycine max
  Clone ID: PAT_MRT3847_97750C.1.pep
MQNDEGQITELYIPRNCSAHNTLITAKDQASVQINIGHLEENGVDNGQFSTFALCRFSRAQGDTDSARHRLWHIKTVEVKQQ

SEQ ID NO: 283199 - protein, 118 aa, Glycine max
  unsure (1)..(118): unsure at all Xaa locations
  Clone ID: PAT_MRT3847_97751C.1.pep
VHRKYIFAGHVAEYINILQDNDEKLYGRQFNVNIDAGIKADGLEKXYSAAHKAIRAAPAKPRGDLELGFFGTRTKKKDPKATPKKYTLKQKISLQQRQSRIRQKLKAANPELKNVHQF

SEQ ID NO: 283200 - protein, 123 aa, Glycine max
  Clone ID: PAT_MRT3847_97752C.1.pep
MSFFWFSNMVRMHLSWPVLTYAATWITLLTLMVAAASMSPQVAFVSAITPSSKFSQKCSSGGSIRMPLDVPGDILCFPAHMFVRSKVDLIVPPVFAAVIVAASACVVRAVGLWEHDQTPSDAN

SEQ ID NO: 283201 - protein, 95 aa, Glycine max
  unsure (1)..(95): unsure at all Xaa locations
  Clone ID: PAT_MRT3847_97753C.1.pep
SLTHXHTLXPWXRFGNPXLHXSAVVLFXGLYXAXAEQSXTHKSXYIVXVAXXXMXESXEXXACGESSXXSVSXXXXDDLHLRQXIHGYXTRXNAE

SEQ ID NO: 283202 - protein, 62 aa, Glycine max
  Clone ID: PAT_MRT3847_97754C.1.pep
MERMGRVPKLEVTMMHMLMMRTLKMFLKLVKMSHAMNMLVINAYSKIMIKMKIYNMTTFMVK

SEQ ID NO: 283203 - protein, 79 aa, Glycine max
  unsure (1)..(79): unsure at all Xaa locations
  Clone ID: PAT_MRT3847_97755C.1.pep
MNEQLKMELKKVKAIXGLTTILEDSEFSWIMEDSNPWKTDEKIQQGSTTNELTKCYRRYXEQMRKSVTLNYQKILFIEC

SEQ ID NO: 283204 - protein, 50 aa, Glycine max
  Clone ID: PAT_MRT3847_97756C.1.pep
HPLHGSSSYWITKLTILAFLNMQSENLKRIHTIIHGALEPSHSSFHSKKT

SEQ ID NO: 283205 - protein, 70 aa, Glycine max
  Clone ID: PAT_MRT3847_97757C.1.pep
GIFSKINQCFPRKKKKPIFFAFFFPPFGGGFFTYVKRGPFFFNLSGTTPLGKKKDPALFFFFPIFFLFFF

SEQ ID NO: 283206 - protein, 46 aa, Glycine max
  Clone ID: PAT_MRT3847_97758C.1.pep
NQLTFLHQNDELFDNYVDNYETKVTLFNPQLKLAYIALDALKKALY

SEQ ID NO: 283207 - protein, 442 aa, Glycine max
  unsure (1)..(442): unsure at all Xaa locations
  Clone ID: PAT_MRT3847_97759C.1.pep
MGEWIVGAFINLFGSIAINFGTNLLKLGHNERERHLLGSDGVNGKMNLKPIIYFQSWRIGIVFFFLGNCLNFIFFGYAAQSLLGALGSVQFVSNIAFAYIVLNKRVTEKXRATIQSFFLGWHHVIGKKRXKNCFKSKVVDVXYTCIFFILYLLALISIVALHHSIYKRGGPLFAVSGHDLRPYWSMLLPFSYAVVSGAXGSCSVLFAKSLSNLLRLAMSNGYQLHSWFTYSMLLLFLSTAGFWMTRLNEGLSLFDAILIVPMFQITWTFFSICTGFIYFQEYQVFDALRTTMFMLGMMCVFIGISLLAPDESKVSGPETKDSSLDSMVSSAISTEANRLVVSPEEAQNKDTRSLVKAILIKITDLLVKAKTTCALSLGFGEDTINASSVLVMPMMSSRMTGFRGNGLERARILSMRNGWRKIPMDEDAGKLLETSSVVPPSP

SEQ ID NO: 283208 - protein, 57 aa, Glycine max
  Clone ID: PAT_MRT3847_9775C.1.pep
RAVFGSSFRVHFVILLPLPHCALPGDTGAVSAETNGRRIISADGSTWRHQPRRGSVS

SEQ ID NO: 283209 - protein, 60 aa, Glycine max
  Clone ID: PAT_MRT3847_97760C.1.pep
YRSGTPLITHSSSHTFDHPSNSLYFNVKNSHIQWRMFYIRHQPFTTNFLSKQIICFFPHS

SEQ ID NO: 283210 - protein, 109 aa, Glycine max
  unsure (1)..(109): unsure at all Xaa locations
  Clone ID: PAT_MRT3847_97761C.1.pep
DARVYLENLVGRSSRGRPGRPLXPTKTYICALFDXYIESPEIEKHCGLFNPNKQNKYPFGSGLKRNKKVVINEXMQHFPARVTCGVAVRLYQCGLLQLAHKIGENMLFV

SEQ ID NO: 283211 - protein, 94 aa, Glycine max
  unsure (1)..(94): unsure at all Xaa locations
  Clone ID: PAT_MRT3847_97762C.1.pep
MRSSNAPSGKTPRRPFFFSFFFFLFFFFFFFSRKDPNTPPKKKKSPAPHIHHTPAPQTNPPPHPPTPPPPPPXPPHSTPPPPPPPPPHPPSPPS

SEQ ID NO: 283212 - protein, 54 aa, Glycine max
  Clone ID: PAT_MRT3847_97763C.1.pep
LLVKSIDFEVICRYFYCQKLGINFGIKIFFLNMPRNTNRPKVTVIPTRLVPSKP

SEQ ID NO: 283213 - protein, 804 aa, Glycine max
  unsure (1)..(804): unsure at all Xaa locations
  Clone ID: PAT_MRT3847_97764C.1.pep
LIRSYLPCRGFLPSRIDPPDNWSILRSDELRRSKPTPVDEARAEVEESLVLNIVEESLXKAVPHYLRRVSSALKKHTGKPLPLTCTPIKFGSWMGGDRDGNPNVTAKVMCFAVSITKVTKDVSLLSRWMAIDLYIREVDSLRFELSMNHCSDRLSRLAHEILEAKHENRRENWNQSANRSLTLPTQLPARAHLPSIAENGESRHPRLDIPAPDYMHGRVGGRXVLDEFLQFLEKSRRRLEILLEDVACDYDPLDYYETSDQLLEPLLLCYESLQSCGSGVLADGRLADLIRRVATFGMVLMKLDLRQESGRHAEALDAITQYLDMGTYSEWDEEKKLDFLTRELKGKRPLVPVSIEVHPDVKEVLDTFRIAAELGSDSLGAYVISMASNASDVLAVELLQKDARLAAIGELGKACPGGTLRVVPLFETVKDLRGAGSVIRKLLSIDWYHEHIIKNHNGHQEVMVGYSDSGKDAGRFTAAWELYKAQEDVVAACNDYGIKVTLFHGRGGSIGRGGGPTYLAIQSQPPGSVMGTLRSTEQGEMVEAKFGLPQIAVRQLEIYTTAVLLATLRPPIPPREEKWRNVMEEISNISCQCYRNVVYENPEFLAYFHEATPEAELGFLNIGSRPTRRKSSVGIGHLRAIPWLFAWTQTRFVLPAWLGVGAGLKGACEKGYTEELKAMYKEWPFFQSTIDLIEMVLGKADIPIAKHYDEVLVSKERQELGHELRSELMTAEKFVMVISGHEKLQQNNRSLRRLIENRLPFLNPLNMLQVEILKRLRRDDDNRKIRDALLITINGIAAGMKNTG

SEQ ID NO: 283214 - protein, 88 aa, Glycine max
  Clone ID: PAT_MRT3847_97765C.1.pep
WSRRWFVLNEKTGKLGYTKKQEERHFRGVITLEECNIDEIPDDDEASTKNSKDKKSNGPDSGKASNLIFKITSKVPYKTVMKSESAVL

SEQ ID NO: 283215 - protein, 78 aa, Glycine max
  Clone ID: PAT_MRT3847_97766C.1.pep
NTPFCLLLFARLKTRDDKTNSAPPTEGRSSSYNLIPQRQERTSFLRIGVVKRRPAFIVPPATTSRSAPAVRKSTAFKA

SEQ ID NO: 283216 - protein, 56 aa, Glycine max
  Clone ID: PAT_MRT3847_97767C.1.pep
KASNIKVGWGIHKYNSHYSEVHCTTIYLTKHKSKNSQKSTKHPFLSCSLAGDKVGG

SEQ ID NO: 283217 - protein, 88 aa, Glycine max
  Clone ID: PAT_MRT3847_97768C.1.pep
MAPPREHRRRRVRPPGRASAQWRVSVGLDQPAPFDQDPTNGGWSGCFKSGALILDPTVAWENEQATQDSEVQQVEIAEQELIEGKLCP

SEQ ID NO: 283218 - protein, 73 aa, Glycine max
  Clone ID: PAT_MRT3847_97769C.1.pep
KFELQNLRLELVLSFLPNLLLKIEIQNAFFPNQFCHPPLKNKTSLYHINKVKHPRYDRAPHFFLGKIKKVCFP

SEQ ID NO: 283219 - protein, 124 aa, Glycine max
  unsure (1)..(124): unsure at all Xaa locations
  Clone ID: PAT_MRT3847_9776C.1.pep
HAYASSREDFDFVVVNFYEFGFIQDPQAEVDKHRSFLQLEGLDINGRLYLNEQXYSGPSKDAMTYVNWLRKDNRFSDILVQISPSEKGHTFPTLKLRYKPSLVQAARISEFVYSEGRCFSLSKE

SEQ ID NO: 283220 - protein, 173 aa, Glycine max
  unsure (1)..(173): unsure at all Xaa locations
  Clone ID: PAT_MRT3847_97770C.1.pep
MGGVSLRESWCFCKGVSKSERMKAAIFTGKAQAMATIAATAAPNGASGTGFLIHRNLLLTTHANLPSVVAADTAEIRLHNGVAATLAPQRFFITSSVLDLTIVGLDDGDGDSYAQGQYPHYLKTSCXADLDLGSAVFFLGYTEKQELTVGEGKVVIATDNLIKLSTDGIQWSP

SEQ ID NO: 283221 - protein, 240 aa, Glycine max
  unsure (1)..(240): unsure at all Xaa locations
  Clone ID: PAT_MRT3847_97771C.1.pep
DDIWXPKYGDEVKGAFPDDHTGSRILITSRIKEVAYYAGTALPYYLPILNEDESWELFTKKIFRGEECPSDLEPLGRSIVKKCGGLPRAIVALAGHVAKKEKSQREWSRIKEVSWHLTDDMVEMDGLACYTSLPERLKPCFLYFGIYPKDDEINARQLIQYWIAEGFIQPQKTGIADTTELEDVAYFYLIELVHRGLVQVAKRRSDAGVKTCRIHELVYDILCALCQWRSHTNYKAWAKI

SEQ ID NO: 283222 - protein, 96 aa, Glycine max
  unsure (1)..(96): unsure at all Xaa locations
  Clone ID: PAT_MRT3847_97772C.1.pep
LEESAFTGLACQNAVVPPLRLDHVAVSYALWEESLYLKVLIFGLHSPSQFLLLYPFEGKPWCRFLNVSGQPPXFVWGHSACMVGRTRVFVLGGHTW

SEQ ID NO: 283223 - protein, 71 aa, Glycine max
  unsure (1)..(71): unsure at all Xaa locations
  Clone ID: PAT_MRT3847_97773C.1.pep
QGQAQATQEQPSAAATAPSLHPPHRRPTRRAHTPQPQLPAPPKSNTPRARCXRTCNTVRPCYTTNHTFNCE

SEQ ID NO: 283224 - protein, 111 aa, Glycine max
  Clone ID: PAT_MRT3847_97774C.1.pep
DQLSYQSFRGNFWPRKISFTHQRVKVANQVGSIPLDWALGAFILQTAADADIPNHNWIGTIFSDESHTLLSIIGIFIILLTAWSISRWRKPQLKTIYDLEKGRYIITRVGR

SEQ ID NO: 283225 - protein, 540 aa, Glycine max
  unsure (1)..(540): unsure at all Xaa locations
  Clone ID: PAT_MRT3847_97775C.1.pep
MRRSNARTRSAASNLNNNNELMDPIKTKTRSTNLFARNPKASQSKSLRSIILISLSLSFLFLVSYYAFSSPMANFRYRIIVDGGSTGTRVHVFKYRSGRSLEFGRDGLKSMRVNPGLSAFAEDPQGAGGSVAELAEFAKRWIPRESWGETEIRLMATAGLRMLDAAAQERILASCRKVLRDSGFKFRDEWASVITGSDEGVYAWVVANYALGTLGGDPLETTGIIELGGASAQVTFVSREAVLPSFSRTVKFGNTTYNLYSHSFLHFGLNAAQDSLKEALVLGEFNLXAASQSLQKGLRIDPCTPTGYSYNVESWKFPPSSESEKNQYQSTVQARGNFSECRSVALTLLQKGKESCSYQHCDIGSTFIPKLQGKFLATENFFYTSKFFGLRSRAYLSKLMSVGQEFCGEDWLRLKKKYVSHDEEDLLRYCFSSAYIVALLHDSLGIALDDERVKVANQVGSIPLDWALGAFILQTAADADIPNHNWIATIFSDESHTLLSIIGIFIVLLTAWSISRWRKPQLKTIYDLEKGRYIITRVGR

SEQ ID NO: 283226 - protein, 91 aa, Glycine max
  Clone ID: PAT_MRT3847_97776C.1.pep
MVVSGGKGLKRVYDFLTFPTPSLAEAENFAGGPFRSNVRAFLTKHALLPPPSALFPHLLTGQIVFRRGELTEGPDAPGVCLDVGEEDVARS

SEQ ID NO: 283227 - protein, 213 aa, Glycine max
  unsure (1)..(213): unsure at all Xaa locations
  Clone ID: PAT_MRT3847_97777C.1.pep
MVVSGGKGLKRAAKKRVTADFYDFLTFPTPALAESENFAGGPFRSNVRAFLTKHALLPPPSALFPHLLTWQIVFRVGELTEGPDAPVVCLDVVEEDVARSRSVYCDQCRVFGWSGHPVCGKRYHFIIKADGSSIGGYHKPCMCCGDILHLSESKCKSCNHVTTTDDVXDWVYHQLKNTTHLLHGVVHTNGYGHLFRVNGREGGSRFLSGIHIM

SEQ ID NO: 283228 - protein, 44 aa, Glycine max
  Clone ID: PAT_MRT3847_97778C.1.pep
IVVFLYLQDMTTFVCVCIPEFLSLYETKRLVQELTKVEIDTHNI

SEQ ID NO: 283229 - protein, 38 aa, Glycine max
  Clone ID: PAT_MRT3847_97779C.1.pep
ITPKFFKPSFFWVNSLLPITPFSEKGFFVPIRLFIFPL

SEQ ID NO: 283230 - protein, 123 aa, Glycine max
  Clone ID: PAT_MRT3847_9777C.1.pep
FFFFFLGFWVFYFREIKPNKKKTKNKTKPRHKRGQKKTKGPKKTYPIRDSLKSRRRNKDPGKKHPSRPPQGRCPRPRGSKKHPAPGISPPGGDPRRHKGAQGPQMGPPPPPWARAKNSRKADN

SEQ ID NO: 283231 - protein, 97 aa, Glycine max
  Clone ID: PAT_MRT3847_97780C.1.pep
KFRMERGLERWTVDCSCGAKDDDGERMLACDICGVWRHTRCSDIHDTDPVPARFVCQKCQHSESKLKSSGHCKDETVTNVSGSSCFRNGLPVPSDVI

SEQ ID NO: 283232 - protein, 55 aa, Glycine max
  Clone ID: PAT_MRT3847_97781C.1.pep
VCVQGAYLLRIRIRNSLFPISLSAFKVIGQPARWGCFGKGFTWVNPDFFQPDNVS

SEQ ID NO: 283233 - protein, 701 aa, Glycine max
  unsure (1)..(701): unsure at all Xaa locations
  Clone ID: PAT_MRT3847_97782C.1.pep
MVVSGGKGLKRAAKKRVTADFYDFLTFPTPSLAEAENFAGGPFRSNVRAFLTKHALLPPPSALFPHLLTWQIVFRVGELTEGPDAPVVCLDVVEEDVARSRSVYCDQCRVFGELTRPFFLRFIACFDLPCYFCVNKVSPKWSETRLILDQCNAIDPDXYILVYSLFLSSDNTTHLLHGVVHTNGYGHLEPNRLEEGGSRFLSGIHIMDFWDRLCKTLGVRKVSVMDVSKKYGIEYRLLHAIMKGHPWYGDWGYKFGSGSYCLTHESYKSAVESLSNLPLSTFSQGKMPDSRVQDMIKYYQSLSEHELVNIRDLFCFIMGLIGDAHKTASNVDETTCKKRCFNASGLSISWDKSGIERVEQAMIIVLCAVSESKWVSWRALMGAASKLGSSELLDYCLGELGGKMVYGGMVVNSYGCVKTTEGEFRLEAATGACYGILAKNNSLGSKYPSEENLLQCLRYLYDSLLHPQMMVNYEAGTRTLAMNSAQKLFDCKQFVKDYNPEMWPLSDSQMFRLSCHVELVDEFEDSEAITPPELVVLPLNATVAELKNQAANAFQDVYLRFRRLQVDGLHGYSGVDDSTQVKLLLGSRDVVCVRGRCIGKNGLSKFRMERGLERWTVDCSCGAKDDDGERMLACDICGVWRHTRCSDIHDTDPVPARFVCLKCQNCESKLKCSGHCKDETVTNVSGSSCFRNGLPVPSDVI

SEQ ID NO: 283234 - protein, 82 aa, Glycine max
  Clone ID: PAT_MRT3847_97783C.1.pep
FPGRPTRPTSSKRLHKGAFVLRDFNTHIQLGYPTLYVNTLTSHFRHHHITIIITLTILSPPFSLFIMIISTTLSHNCYHHSS

SEQ ID NO: 283235 - protein, 82 aa, Glycine max
  unsure (1)..(82): unsure at all Xaa locations
  Clone ID: PAT_MRT3847_97784C.1.pep
KAGHFLYPNRWIEPVIVGGVIGYSYFLWIGSVVALPHSSVRKSVMSYRDFVVXLTKALVVSPRINISRMPDGYRFSIDGGIK

SEQ ID NO: 283236 - protein, 87 aa, Glycine max
  Clone ID: PAT_MRT3847_97785C.1.pep
SFICDIQQVQSFLMLCLYLSTTLTLNRLNITSILSKANSILSSNISILSVHVMTGLYRSVPKSHSWSEQGIPYGELVSISTSNPDVT

SEQ ID NO: 283237 - protein, 100 aa, Glycine max
  Clone ID: PAT_MRT3847_97786C.1.pep
GKHNKMSITDADSGRKVVDPELLEAIQVTISNNMTQYQPESSAQVALGAAIGLVPTKEHDDVEIAPEITIYDDGRDRNLLNVDTDDRAAYTEDHDETITD

SEQ ID NO: 283238 - protein, 56 aa, Glycine max
  unsure (1)..(56): unsure at all Xaa locations
  Clone ID: PAT_MRT3847_97787C.1.pep
STCYQTRPSSYXXXLEXKYDPCNACQXLVSKLNKYKQYLYKCVGVCVYIFFARTQH

SEQ ID NO: 283239 - protein, 62 aa, Glycine max
  Clone ID: PAT_MRT3847_97788C.1.pep
TKLKTWATKHKPKTKKQHFPNQFERQHYISPKQQIQILLHRGSIYEAHKLRFREAPPTKNPS

SEQ ID NO: 283240 - protein, 74 aa, Glycine max
  Clone ID: PAT_MRT3847_97789C.1.pep
SVSNTCWSHGEAKEISALVAFLCLPAVGVSQLSLLLFIWLLNKILVFFLYRLSFFRPNHAWYIVGWICQLFLNI

SEQ ID NO: 283241 - protein, 384 aa, Glycine max
  unsure (1)..(384): unsure at all Xaa locations
  Clone ID: PAT_MRT3847_9778C.1.pep
MRWCSQVFSVSGSGAHAHALALAPIVTASFSNTSLVLQFQKPLFKFSNSSSLALTHRKLLPSALPLTQPSSSREDFDFVVVNFYHFVFIQDPQAEVDKHRSFFQLEGLDINGRLYLNEQGINAQYSGPSKDAMTYVNWLRKDNRFSDILVQISPSEKGHTFPTLKLRYKPSLVQFEGGMSHLSLLDPSMRAIPLSPSEWRDRLESINKTDLTAKDNSNRNYILLDVRNGYEWDIGHFRGAQRPSVDCFRNTSFGLSREEITASDPLSNVDKEKANILMYCTGGIRCDVYSSILRQQGFQNLYTLKGGVSHYLKNEGPAEWVGNLFVFDSRLSLPPSIYYTGATTEAESTPVSGDDNFAXCYVCSLEVSELRHKNCANLDWNLLF

SEQ ID NO: 283242 - protein, 67 aa, Glycine max
  Clone ID: PAT_MRT3847_97790C.1.pep
HKGLGHVTKVAYDADSRTQALHLSTFQRSGLVRALHDHSLLYALGTIAMTVMRTGGLLKSYWSKQQR

SEQ ID NO: 283243 - protein, 104 aa, Glycine max
  unsure (1)..(104): unsure at all Xaa locations
  Clone ID: PAT_MRT3847_97791C.1.pep
HVFFIPFKLHLTSILFHILLSHKSINSLYLTIHSLNQIHLQFYSYFPPHPHXHLYIFSTPSTLIPTQFIYPSLLINQIPYXYTISRNFILTPFYNLYQFIKKLL

SEQ ID NO: 283244 - protein, 62 aa, Glycine max
  Clone ID: PAT_MRT3847_97792C.1.pep
DEDACYEPLQPISVNQEICSTVSSLSYPHPHHAVFDVQSHGRLCFSINSVMALNPMNPILEC

SEQ ID NO: 283245 - protein, 107 aa, Glycine max
  unsure (1)..(107): unsure at all Xaa locations
  Clone ID: PAT_MRT3847_97793C.1.pep
TKPISPXPSXLXXXXSXXEFXSRNXXLXXPXIAXGVXKHPVXXDXEPVLDHXXXXXXXPXXXEDTGSSNSXXXXXVSPXVXYXHXXXXLRXXXPRAEFPSLRTRXCD

SEQ ID NO: 283246 - protein, 37 aa, Glycine max
  Clone ID: PAT_MRT3847_97794C.1.pep
VDAQGYRLHTQGSRTTAWKARNHRCGYDQVGQLHGAE

SEQ ID NO: 283247 - protein, 99 aa, Glycine max
  Clone ID: PAT_MRT3847_97795C.1.pep
ISLDTHLPNCAIKLRGVHDWFRSRQRRATEVRLLIAIIPEVAGSRAECHITVGATPWDTSDTSQVHAWIRSATWLTCSRIRSAKSKSCHHERHLMGQGQ

SEQ ID NO: 283248 - protein, 43 aa, Glycine max
  Clone ID: PAT_MRT3847_97796C.1.pep
ARNLVRKQFLSIYKIIFIMLKSFILKLNLMARQVRDDKLSPGI

SEQ ID NO: 283249 - protein, 85 aa, Glycine max
  unsure (1)..(85): unsure at all Xaa locations
  Clone ID: PAT_MRT3847_97797C.1.pep
XXSDXFFPWTCCXVARXXXXSWVIFXPYQAFSXFXCXGNXIDYANLTTQHALAPXSPFRRRNDSLMXRRRRSGSMRRLRRRRIFD

SEQ ID NO: 283250 - protein, 64 aa, Glycine max
  unsure (1)..(64): unsure at all Xaa locations
  Clone ID: PAT_MRT3847_97798C.1.pep
ESQAFQTFVNCGNKLKENHERHANEPNVSNLPGRVGPAQLPIPFFHQKRXEGLACTGNPYSIRI

SEQ ID NO: 283251 - protein, 118 aa, Glycine max
  unsure (1)..(118): unsure at all Xaa locations
  Clone ID: PAT_MRT3847_97799C.1.pep
ASLAGKGMGPVIECKLTTTAYCVAVRHHDRVEIMVNDQGNRSTPSYVALTVTLRMIRDAAPNQVDMYPANTVMNAMRLIGRRISIASVHCDLTLXTFKVIPAPAAKPRIVANYRGAEN

SEQ ID NO: 283252 - protein, 99 aa, Glycine max
  unsure (1)..(99): unsure at all Xaa locations
  Clone ID: PAT_MRT3847_9779C.1.pep
RIHNALECGSTYIKYLXPXKRGFLFKLTTTLESSYSIMFRPYKYISTNKFHFILNRNNLKSFEFFXHHLYNLPILPFYKLFYLYSPFNYIDNYTSISFF

SEQ ID NO: 283253 - protein, 116 aa, Glycine max
  unsure (1)..(116): unsure at all Xaa locations
  Clone ID: PAT_MRT3847_977C.1.pep
XXXXTXXXQTXNXTHLXXPXXXXQHMXCXXPXYASXXRSXSXXXXSXGGAXPAMRILXXXDXAXXXXGNRARVCXXXQQLAXEXXXGXXXPXXXXXXXXXLAXXSEXTXAAXXPPX

SEQ ID NO: 283254 - protein, 56 aa, Glycine max
  Clone ID: PAT_MRT3847_97800C.1.pep
PGFILLGVGQFAMDLTEQKVPVKGIVEPDEVFQAVSKFGRKTAFWVVEAPQSKTKP

SEQ ID NO: 283255 - protein, 97 aa, Glycine max
  unsure (1)..(97): unsure at all Xaa locations
  Clone ID: PAT_MRT3847_97801C.1.pep
LTKIKGINIFHPQGAFYLSLGLTFYXAKKAKAFGKKGDLGPPCQNLLEGGQVPLVPGGAFGNAPGPRIFXPKSLSPLQAVVKRFKKALVPLGFVALV

SEQ ID NO: 283256 - protein, 65 aa, Glycine max
  Clone ID: PAT_MRT3847_97802C.1.pep
TRLTLTCMRLQRYSIVIPTPKSMAVAVHLQHWDCHDAAEPKLIGLDAHFPFCSCSNKDQADSDCH

SEQ ID NO: 283257 - protein, 382 aa, Glycine max
  Clone ID: PAT_MRT3847_97803C.1.pep
MVMHSRVRSVAGNIKCAARLFCSSSTTTPPAAPLQFPQTLAGLRARLAEESPSLSDFLALKSESAYSVEVGTKKKPLPKPKWMKEAVPGGEKYVQIKKKLRELKLHTVCEEARCPNLGECWSGGETGTATATIMILGDTCTRGCRFCNVKTSRTPPPPDPDEPTNVAEAIASWGLDYVVITSVDRDDLPDQGSGHFTETVQKLKALKPNMLIEALVPDFRGDADCVEKVAKSGLDVFAHNIETVEELQSVVRDHRANFKQSLDVLMMAKENAPAGTLTKTSIMLGCGETPDQVVKTMEKVRAAGVDVMTFGQYMRPSKRHMPVSEYVTPEAFDKYQKLGMEMGFRYVASGPMVRSSYKAGEFYIKSMIESDRAASPSKLTSS

SEQ ID NO: 283258 - protein, 576 aa, Glycine max
  Clone ID: PAT_MRT3847_97805C.1.pep
MSEDCNSGAASLLLSSPSNSKIVGDKRGSTHRGHSARKRVKMKDLDAVVHSVETNSRYSEFKNDKENTVQWSLGATDASQQVTTGRNAMPEEFNFVARPLILNTEACKGGGCVVNFAKDSLSEKQEKGHGNLVVSRGINVDLNAEDATGSVNLEPANSSKGCNPFKSKDVSESGSCVGPLAQKDPMTKWKQMKEYGFWSPSHAGIPKPKHHGRKSMNEMLKRKIELAKREQVNRFTKIAAPSGLLNDLNPGIINHVRNRKQVLSIIENLVRSEKHESTSVGSKHAAHCIQGNVEVSKRDQENVADVSEHQHDFACEEGALHSTSGSRQARKFPVTTNDSSSLILEGRVCDCDIGSLDKGSLKSCMTQSTNVVEDDALALKLSSEMRASMSSTGLSNEESSNVTMVSSLSLKAATVASQWLELLQHDIKGRLSALRRSRRKVQSVITTELPFLLSKEFGNNQDYDPCTMKMSAGLPTGKIADMHRARWTSLFDHMDEALSEEEKKLECWLNQVKEKQLLCDQGIQHVNWSSVFGLQQLGNSENNSRAPAFDSSEKDLAVNAAAASIYSTCNFLLSKS

SEQ ID NO: 283259 - protein, 126 aa, Glycine max
  unsure (1)..(126): unsure at all Xaa locations
  Clone ID: PAT_MRT3847_97806C.1.pep
MDHSADAHRTDLMTITRFVLNEQSKHPESRGDFTILLSHIVLGCKFVCSAVSKAGLAKLIGLAGEXNVQGEEQKKLDVLSNEVFIKALISSGRTCILVSEEDEEAIIVEPSKRGKYCVCFDPLDGS

SEQ ID NO: 283260 - protein, 339 aa, Glycine max
  Clone ID: PAT_MRT3847_97807C.1.pep
MDHSADAHRTDLMTITRFVLNEQSKHPESRGDFTILLSHIVLGCKFLCSAVNKAGLAKLIGLAGETNVQASEQKKLDVLSNDVFIKALVSSGRTCILVSEEDEEATFVEASKRGKLYCVVFDPLDGSSNIDCGVSIGTIFGIYLIKEDHEPTIEDVLQPGKNMLAAGYCMYGSSCTLVLSTGSGVNGFTLDPSLGEFILTHPDIKIPKKGKIYSVNEGNAKNWDDPTTKYVENCKYPRDGSSPKSLRYIGSMVADVHRTLLYGGIFLYPADKKSPNGKLRVLYEVFPMSFLMEQAGGQAFTGNQRALDLVPKKLHERSPIFLGSYEDVEEIKALYAAEE

SEQ ID NO: 283261 - protein, 60 aa, Glycine max
  Clone ID: PAT_MRT3847_97808C.1.pep
QDLSSCAVPLNGLTSNPKSTTITLHNKSQPRCNPSYCFTESPSTIWTISLLNLCYILCCS

SEQ ID NO: 283262 - protein, 58 aa, Glycine max
  Clone ID: PAT_MRT3847_97809C.1.pep
NCTLQRKIAASKTSKLMINNDKNIRDSITLLAVCTFSVKTHADRNRRVAFDIRIYFRA

SEQ ID NO: 283263 - protein, 67 aa, Glycine max
  Clone ID: PAT_MRT3847_9780C.1.pep
RKTLFASLTAPSCCQLLFYPLYLLLYMCDSVNFSSVSSQLHGLNAELGMKNMNPTHNLRLKSTKGIP

SEQ ID NO: 283264 - protein, 340 aa, Glycine max
  unsure (1)..(340): unsure at all Xaa locations
  Clone ID: PAT_MRT3847_97810C.1.pep
MDHSDAQRTDLMTITRFVLNETIQXHPESRGDFSILLSHIVLGCKFVCSAVSKAGLAKLIGLAGETNVQGEEQKKLDVLSNEVFIKALISSGRTCILVSEEDEEATFVEPSKRGKYCVVFDPLDGSSNIECGLWSFKVIWHNLIKEDHEPTIEDVQPGKLNMLAAGYCMYGSSCTLYTGAGVNGFTLDPSLGEFILTHPNIKIPKKGKIYSVNEGNAKNWDRPTATYVEKCKFPEDGSSPKSLRYIGSMVADVHRTLLYGGIFLYPADKKSPNGKLRVLYEVFPMSFLMEQAGGQSFTGKERALDLVPTKLHERSPIFLGSYDDVEEIKALYAAAEGEQE

SEQ ID NO: 283265 - protein, 72 aa, Glycine max
  Clone ID: PAT_MRT3847_97811C.1.pep
KKFSSYLTLRIAYKKTVGFGYYFSVTEWFSPVGTMIGFVVVEFHLKKKKKKGEGGRGSSSSPTRNCIPDRSR

SEQ ID NO: 283266 - protein, 58 aa, Glycine max
  Clone ID: PAT_MRT3847_97812C.1.pep
SILIFVFPFHILQCPLLNISYCPASEVDLVQGKNLVKIFISSHILSFFPHSSGVLVYI

SEQ ID NO: 283267 - protein, 44 aa, Glycine max
  Clone ID: PAT_MRT3847_97813C.1.pep
DQPIQQAHALMTHLYRTQTTHCKGKIFYTYCPSIKTLTTTLTHT

SEQ ID NO: 283268 - protein, 109 aa, Glycine max
  Clone ID: PAT_MRT3847_97814C.1.pep
DPTFRKLFVDYIASAYRDTDSLWGLGDYNCTMMPQATIKTPSKEVITVLNYLCSDPENMVFIVSGRDKDCLSKWFSPCEKLGLFGEHGYFTRGTKDFSWETLRLTTDFE

SEQ ID NO: 283269 - protein, 48 aa, Glycine max
  Clone ID: PAT_MRT3847_97815C.1.pep
SEIKLLILRCFTDYHTICYKLHHIRHMNMLITLHIILNIILLSTPWTI

SEQ ID NO: 283270 - protein, 153 aa, Glycine max
  unsure (1)..(153): unsure at all Xaa locations
  Clone ID: PAT_MRT3847_97816C.1.pep
SLMEIFFLACFDFVIFLRTVRRDLTRCDXLDKEAQAKMNERALLDXEALLTGDVFIEPDGSKLLCVMVADWVQILVMAVCTISFCXNMRFDVHQHCRGMLVTXMIILYIFLGIADKYDMCSLWRTIKETIEGWRYIYCIYACYIPVIALIILT

SEQ ID NO: 283271 - protein, 39 aa, Glycine max
  Clone ID: PAT_MRT3847_97817C.1.pep
HSYTHGFLLSSDINLKHIPGIIWKDPEKETLFDHTTTTS

SEQ ID NO: 283272 - protein, 217 aa, Glycine max
  unsure (1)..(217): unsure at all Xaa locations
  Clone ID: PAT_MRT3847_97818C.1.pep
MSGHWGILVSDPWLQNQFTQVELRSLKSHFMSMRRESGRLVIADLASKMSRLKVVGENLSEEERASCVKDVYQNTEEEVDFELFLKVYLKLQTFVNSRTGSSPKNSLAFLKAATTTLLHTISESEKASYVAHINHYLAQDEFLKKYLPIDPSTNELFEIAKDGVFFCRLINVAVPGTIDERXINTKKILNPWERNENHTLCLNSAKAIGCTVVNIGT

SEQ ID NO: 283273 - protein, 63 aa, Glycine max
  Clone ID: PAT_MRT3847_97819C.1.pep
NGSPQPQVAGAFLTALPLSTLDFKNLSITSYFFAYDFLRERKSLSELATDSVNHYLFHSWFIC

SEQ ID NO: 283274 - protein, 65 aa, Glycine max
  Clone ID: PAT_MRT3847_9781C.1.pep
LIDALTTPLKHYSQKTLSQSTKLFPNRNLPQFYQDLDIQHSSHFRKHTIRSQRLILHTHKTPIPA

SEQ ID NO: 283275 - protein, 46 aa, Glycine max
  Clone ID: PAT_MRT3847_97820C.1.pep
SVVGRRPFFLFFYYNTRIDKGRMQLCVIQIMLWVIDAIYMERDWLC

SEQ ID NO: 283276 - protein, 92 aa, Glycine max
  unsure (1)..(92): unsure at all Xaa locations
  Clone ID: PAT_MRT3847_97821C.1.pep
KXAIKWSPRALCSALCFVFHQSLSHSDMCFITLIDNHPVLDRNSVPNEMMVTGIWIVSFPTQLNPTQPSQLITNQFVDKYGNIIGLANKKNE

SEQ ID NO: 283277 - protein, 61 aa, Glycine max
  Clone ID: PAT_MRT3847_97822C.1.pep
SILKFSNVVKITLDWASVGDSETNLFKFIFIYGIIHGTPYNLRISHVLRSLINLISTYQLF

SEQ ID NO: 283278 - protein, 84 aa, Glycine max
  unsure (1)..(84): unsure at all Xaa locations
  Clone ID: PAT_MRT3847_97823C.1.pep
PPLKSRNQXXEIXVDXXSTSQXLXXXXSTINXPLWXXGYNCFXXDXXFASLXXXXRXXXXXXTXRXXSXLXMXXXXXXXXXXXX

SEQ ID NO: 283279 - protein, 459 aa, Glycine max
  unsure (1)..(459): unsure at all Xaa locations
  Clone ID: PAT_MRT3847_97824C.1.pep
IRLELSLVIAGTGPLAVESASAAGGLVQPELYTSKDWINGVRFYSSAFQDLIAGGYLSPESKTLCVETPTGRDVFALREIGVKDAVGIARXAAKPLVKFGRGERIPFGDGAFDFVFSGEDSFVKSAKPAEFAAEIGRTLRPGGFAVFHFANPKDTYSFNSFLDLFNCFRVVKLHGLEGFDSSMPYIREIVLKKECGDGAGKFDFDDSNGKCYVPGYKHDLVKIAEPLIEEEPLKPWITLKRNVRSIKYLPSIADISFKNRYVYVDVGARSYGSSIGSWFRKQYPKQNKTFHVYAIEADKTFHQEYGLKKGITLVPYAAWVKNETLMFEIHRDPGEHVEVKGRGMGRIQPLQSSGRGEFDGEVEKIQGFDFANWLKKTVSKNDFVVMKMDVEGTEFDLIPRLFKTGAICLVDEIFLECHYNRWQRCCPGQRSAKYEKTYDQCLQLFKSLRQSGVLVHQWF

SEQ ID NO: 283280 - protein, 60 aa, Glycine max
  Clone ID: PAT_MRT3847_97825C.1.pep
EGELVVCFVSVELVVNYEHVLLRLVAREWMGKYDSVDYLISGVFQLWNGIGLKVGVEHGV

SEQ ID NO: 283281 - protein, 59 aa, Glycine max
  Clone ID: PAT_MRT3847_97826C.1.pep
LKLFVPLVKPTVYLKKREGNAHNYRGHVVFCSLITLEECFPITIRSSGKILWPKETFCL

SEQ ID NO: 283282 - protein, 92 aa, Glycine max
  Clone ID: PAT_MRT3847_97827C.1.pep
LRLGSGLFLQMLSIVSLPVNIPAWKCKVITMLQVTYGHVLVLDYTIDDTSAKRGYDSYLHCLDDIQDEYLQAPVGNLAVQLLMFKHILNASF

SEQ ID NO: 283283 - protein, 49 aa, Glycine max
  Clone ID: PAT_MRT3847_97828C.1.pep
NWNINLTFLFQLKLCSSSSVRRGHLQFTFYKHRKHLLSNINMNKIRNKN

SEQ ID NO: 283284 - protein, 34 aa, Glycine max
  Clone ID: PAT_MRT3847_97829C.1.pep
QVFLMKRASHVYRGASFINKAFIKVLLLGGGYMN

SEQ ID NO: 283285 - protein, 65 aa, Glycine max
  Clone ID: PAT_MRT3847_9782C.1.pep
RRVLMQSCFRQMQGPHDCVHDLCAPILDDLFLARAVCIRLMNMFFDCIGVIVFKVVFCSGINYYS

SEQ ID NO: 283286 - protein, 238 aa, Glycine max
  unsure (1)..(238): unsure at all Xaa locations
  Clone ID: PAT_MRT3847_97830C.1.pep
GYGTSYQPPSTLEGWNYTAKNLLMYHPADRGEVPLTEEERAHRIKAATKEINRGNTRFHGKMMDSRPKDDGTVEVLYTPVAGATPAPMSLREGDKLKKYDLEDLRNTPXIGGSADGPHYKILIAPARDSKAHRLSREAARKIRERSKMFHKPPLASPVRGGSASPSMRTLSPAAQKFVRNAFAKSSSSVDETLRASYRGSTPALATPRSVSRSVSRFGRDGSLASRSPSVREGSNPPL

SEQ ID NO: 283287 - protein, 45 aa, Glycine max
  Clone ID: PAT_MRT3847_97831C.1.pep
DILQTMMPTMLRNPDPCLGNEFYIFACCAEASTSASAPWSRICAI

SEQ ID NO: 283288 - protein, 172 aa, Glycine max
  Clone ID: PAT_MRT3847_97832C.1.pep
HQAIARVILIGAILLLVLLFFLPGIVYSREWSFFTVPTSFSFYYSRFTRADPNDDELYKEFISIEDSVRNRSAQSTREKKCCIMNVLEREQFSMLGEEHSAKLLVRKWDFWLYYIAYFCGGTIGLVYSNNLGQISQSLGHYSQTSSLVTLYSTCSFFGRLLAASPDFLSRYF

SEQ ID NO: 283289 - protein, 46 aa, Glycine max
  unsure (1)..(46): unsure at all Xaa locations
  Clone ID: PAT_MRT3847_97833C.1.pep
WVYQDLLTGDELLSDSFRYKEIEIGMLWXVEGKWVVIGSVSCMNLG

SEQ ID NO: 283290 - protein, 545 aa, Glycine max
  Clone ID: PAT_MRT3847_97834C.1.pep
MELCTRTFTSFFLFNPSSSSNPLFLRANANAKTPFKFNSLKLSSFPPHIHLFQPFLSPHTSSPFTLSAASASSSSSSSSVAVGTEQDRLPAELNVTETAEPNSRVRLHVEVPSLVCEDCYKRVIAEFMKQAKIPGFRPGKKVPENILISYVGSQNVQKATIESILRRTLSHAMTSVTGRALQDSVQIVTKFSEMEETYSSLGSLRYDVLVDIAPEIKWIPDNNAYKNLKIVVEIDSDIDAHTASEQEFRRRYKSIGALKVVTDRGLQVGDVVVLDISATTIDQDESNVKSIPSAESKGFNFDTEYGEKVLPGFLDCIIGIQQGESKSFPLVFPETWNQENLRGVHAQFTVECKELFYRDLPELDDSIADKLLPGCTTVEQVKDLLLQKCQEVEQTAREQATDNAILDQVSKIVQVDIPQSLFEEQGRQLYGANLLEIQAKMKLNEQQLATLSSSKAVNEFLEHQKENITNLIKQSLAVGDIYRRENLQFATEDLVKEVENSIAEFKRQNQEYDEERVKGQVQEILEGAKVLEWLREHAEVQYITK

SEQ ID NO: 283291 - protein, 432 aa, Glycine max
  Clone ID: PAT_MRT3847_97835C.1.pep
KFCWISRNLSANNFKGSIPVELGHIINLDTLDLSSNNFSGHVPGSVGYLEHLLTLNLSHNSLQGPLPAEFGNLRSIQIIDMSFNYLLGSVPPEIGQLQNLVSLILNNNDLRGKIPDQLTNCLSLNFLNVSYNNLSGVIPLMKNFSRFSADSFMGNPLLCGNWLGSICDPYMPKSKVVFSRAAIVCLIVGTITLLAMVIIAIYRSSQSMQLIKGSSGTGQGPPKLVILHMGLAIHTFDDIMRVTENLNEKYIVGYGASSTVYKCVLKNSRPIAIKRLYNQHPHSSREFETELETIGSIRHRNLVTLHGYALTPNGNLLFYDYMENGSLWDLLHGPSKKVKLDWEARMRIAVGTAEGLAYLHHDCNPRIIHRDIKSSNILLDENFEARLSDFGIAKCVSTARTHASTFVLGTIGYIDPEYARTSKLNEKSDVYS

SEQ ID NO: 283292 - protein, 62 aa, Glycine max
  Clone ID: PAT_MRT3847_97836C.1.pep
SRSRTAVGDIYRRENLPDSVLSNLLYFPSDAQEIRSQPLNFTESPAAAHLVIIFACISNRLA

SEQ ID NO: 283293 - protein, 86 aa, Glycine max
  unsure (1)..(86): unsure at all Xaa locations
  Clone ID: PAT_MRT3847_97837C.1.pep
QVGDVVVLDIAATTIDQDESNVKSIPSEESKGFNFDTEYGEKVLPGFLDCIIGIQQGESKSFXLVFPETWKQENLRGVHAQFTVSF

SEQ ID NO: 283294 - protein, 131 aa, Glycine max
  unsure (1)..(131): unsure at all Xaa locations
  Clone ID: PAT_MRT3847_97838C.1.pep
QIPGFRPGKKVPESILISYVGSQNVQKATIESILRRTLSHAMTSVTGRALQDSVRIVTKFSEMEETYSSLGSLRYDVLVDIAPXIKWIPDNNAYKNLKXVVEIDSDIDAHTASEQEFRRRYKSIGALKSGY

SEQ ID NO: 283295 - protein, 71 aa, Glycine max
  Clone ID: PAT_MRT3847_97839C.1.pep
HFFTKKKIKIYTQKKLKIVELMKIESFYIINFRCRQMEKKKRKKVVCFLKRQNIGVVREKSGTEQQKKRTT

SEQ ID NO: 283296 - protein, 59 aa, Glycine max
  Clone ID: PAT_MRT3847_9783C.1.pep
MSLKNGLPSHDDGTGSMHLLALYKPLDMYTWGLFRYMLRVASYRVSMLHQQDPTDVIDY

SEQ ID NO: 283297 - protein, 79 aa, Glycine max
  unsure (1)..(79): unsure at all Xaa locations
  Clone ID: PAT_MRT3847_97840C.1.pep
SIPPYLESLHLAPAYALKPHTRGHISLTPNAMQNETITHMWRHFVKDLVFXVVQFNSPYIICTLHHFIAFGIIIDGVIS

SEQ ID NO: 283298 - protein, 67 aa, Glycine max
  Clone ID: PAT_MRT3847_97841C.1.pep
EYTTAFNDSFVNNNIYFYTLSKAALCYLCLAIPTGYLSVRYPGTMIDINLSHYWVECLLTELITTDL

SEQ ID NO: 283299 - protein, 137 aa, Glycine max
  Clone ID: PAT_MRT3847_97842C.1.pep
EIAEGTSPNCPGLSTLILSHNLISHIPKCFFRHMNALTLLDLSYNYELTSLPKSLSKLRSLTSLVLRQCSKLKDIPPLGDLQALSRLDISGCDSLLRVPEGLQNLKKLQCLNLSRDLYLSLVPGCALAGLSNMQYLD

SEQ ID NO: 283300 - protein, 76 aa, Glycine max
  unsure (1)..(76): unsure at all Xaa locations
  Clone ID: PAT_MRT3847_97843C.1.pep
LNTHAGMEPFLLPPNRPLMAFNPFINLLTPNYGATLTLTPLVRQFLIMAXGLIKKTFLAPKDFGEKSSTGYKKWGF

SEQ ID NO: 283301 - protein, 115 aa, Glycine max
  unsure (1)..(115): unsure at all Xaa locations
  Clone ID: PAT_MRT3847_97844C.1.pep
FFSXXFFXLFVSFVLXXFSSFGFRVLFLGXFFPGVLLXALLXXVALXAFVRWFFLXXXVLLSGPSPLLXFLXXXLFLCAXGAXXFXGCQRXXLGLXRELLSPSPRLSLSAXVGXS

SEQ ID NO: 283302 - protein, 161 aa, Glycine max
  Clone ID: PAT_MRT3847_97845C.1.pep
MTTAIVRDQNLEKHIHKQMGCMAGFLQIFDRHQILTGKRIYSHKRLPPASPEPEKPAASPTRSTPSPPREVVSSEPKASVPTLPVLEFKEGTRSSWKFAREAPRLSLDSRAIVDAKGTLHLHPRGEIPPENDADKQRRSTSVIAKLMGLEPLPDSEPEPGP

SEQ ID NO: 283303 - protein, 136 aa, Glycine max
  unsure (1)..(136): unsure at all Xaa locations
  Clone ID: PAT_MRT3847_97846C.1.pep
RVDPAFALATEDARAGDNWDSTKAIKIAKNMNLRQSVVGDLKLLTEGKIYEGXHITVHNISAWENHVSQIPLMIQEEILTCSASDFRTAMASKXIAMHKTTEMHAGAIEIITDTFARTDLYIIGAMLLVDTYHYQP

SEQ ID NO: 283304 - protein, 213 aa, Glycine max
  Clone ID: PAT_MRT3847_97847C.1.pep
MESLASICEVVLPPLPMDALKIRKEDQIDDYDSSKSLKSFWDISASRYPIPHEVAEMLTKRSLIEAVILIRVVLWLLATRLGTLLLCGFLCLGEKWPYVNNFSNISLEKREMVMQKWLKHRFLTPIRLAFAYIKVLCLFVFFSWVDENGDNPAWKAIGYEVPADENLTNASKTRPLEKGIIETMNESDSALQQSLANKGLYVTLDSKATSSQM

SEQ ID NO: 283305 - protein, 189 aa, Glycine max
  Clone ID: PAT_MRT3847_97848C.1.pep
SGWGRYRISGSSLLAAMDQSSQAPYSDVLSAQSGDLSAMHNKEENDGSHFSNETLTRVDDRTGRAHQTVDVAEVIRRWTHALQRIHKQSLHLAKANDGEGPDILRSAQEGDSSGHAESLATTLAEHQQHLASFQVLINQLKDVAPTIQKSISECTEKVNCITSNLPPTNRPNGRSTSPIQTQSSGRMDN

SEQ ID NO: 283306 - protein, 67 aa, Glycine max
  Clone ID: PAT_MRT3847_97849C.1.pep
DIYIYSVARYDKMGSFVILCTFAPMRVHLNDTHLWIMMRVFNLRKLHQPTVPVLRPVFLRKVSQSFG

SEQ ID NO: 283307 - protein, 117 aa, Glycine max
  unsure (1)..(117): unsure at all Xaa locations
  Clone ID: PAT_MRT3847_9784C.1.pep
KALGCLEGERTSVGLAARDPSGILSPYTYNLINTGPDDVYIKVHYCGNCHSDLHQIKNDFGMFNYXMDPGHEEVGEVLEVVSDVCMFRVVELVVVGLIVSCSNNCHPCQLDIENYCC

SEQ ID NO: 283308 - protein, 79 aa, Glycine max
  unsure (1)..(79): unsure at all Xaa locations
  Clone ID: PAT_MRT3847_97850C.1.pep
TDIGRALYQDVDDFYRPCDPYKENLRLYRMQSASSDGTLSAXKLLHXLPEPALGITRARDGMNRWVWTPVAAAHSDSRL

SEQ ID NO: 283309 - protein, 50 aa, Glycine max
  unsure (1)..(50): unsure at all Xaa locations
  Clone ID: PAT_MRT3847_97851C.1.pep
RRXYTTKRLMLTTKTNGEGVFEEQHGGSKGGLETSLSCGGYTSSRGTKLV

SEQ ID NO: 283310 - protein, 112 aa, Glycine max
  Clone ID: PAT_MRT3847_97852C.1.pep
MCKRKCPGRELKLPSRPTSAELSSSTSSGEWPELSSSSSASSVSCTSKMPKESEEENEQRENSTPETKAMDLVGCPRCFMYVMLSEVDPKCPKCKTTVFLELFKDENLKTNS

SEQ ID NO: 283311 - protein, 49 aa, Glycine max
  Clone ID: PAT_MRT3847_97853C.1.pep
NIGNFIFISNFLASFSFLINFICNFAYLKVYNSIIGCDEDIFVLVKSRF

SEQ ID NO: 283312 - protein, 97 aa, Glycine max
  unsure (1)..(97): unsure at all Xaa locations
  Clone ID: PAT_MRT3847_97854C.1.pep
MAMAVFAIAFERSLTRLEISFFQPGLYADPXRSSLRALTKSQLREIITPAACTICSSLKNYNVHSYVLYESTLFAYAYKIIIITCGXTKLSLAIPPI

SEQ ID NO: 283313 - protein, 61 aa, Glycine max
  Clone ID: PAT_MRT3847_97855C.1.pep
LFRSFEFDLTRYLIIINIPYNQGRAYPMFKLGSHKMGNEEYLSGSVKGTWVGIKIVFFETR

SEQ ID NO: 283314 - protein, 39 aa, Glycine max
  unsure (1)..(39): unsure at all Xaa locations
  Clone ID: PAT_MRT3847_97856C.1.pep
GLCSVLWLWVVPRAKQHGPVVLGXKLPWEGPQDGHGKGH

SEQ ID NO: 283315 - protein, 51 aa, Glycine max
  Clone ID: PAT_MRT3847_97857C.1.pep
FHLLVHPHKKYKALTLINGNASNRNKSAKKQGGSLSWSLHDGIWIKPKVIT

SEQ ID NO: 283316 - protein, 49 aa, Glycine max
  Clone ID: PAT_MRT3847_97858C.1.pep
LSDGPIRYGDIYTLGIKQRGLFISGQFLGPESYSEASDDLMVSDDYYLS

SEQ ID NO: 283317 - protein, 121 aa, Glycine max
  unsure (1)..(121): unsure at all Xaa locations
  Clone ID: PAT_MRT3847_97859C.1.pep
SHLPEHLQYSLLHTIXDTPVFIWPESLRQFGYHSSKAYAWSWRVXLYNLLAGHLQLDDFDIPGMCRGMFLNDYHXPGWISXKSVRSLMYQLLHPNPITPISLEKVCDLNKWFKNNSMLEVK

SEQ ID NO: 283318 - protein, 62 aa, Glycine max
  Clone ID: PAT_MRT3847_9785C.1.pep
NFNSIKGFEVVDEIKVAVDKACNRPVVSRADILAVAARDSVAIVSSIQTIHQFNLLVQEIIV

SEQ ID NO: 283319 - protein, 88 aa, Glycine max
  unsure (1)..(88): unsure at all Xaa locations
  Clone ID: PAT_MRT3847_97860C.1.pep
IKDDIWQNPLQYYLVPDMDDXEGEAEDDDDDDEEEEGLEDIDEEGDEDEGEEDDDEDEGEEGEEDEGEDDXHRRLMDSNLLFYFLFFF

SEQ ID NO: 283320 - protein, 49 aa, Glycine max
  Clone ID: PAT_MRT3847_97861C.1.pep
VCGAKQVHVEDFFKTAIPRATTHIVFGPSNSFRFPVKSVSIRSLSYSRS

SEQ ID NO: 283321 - protein, 81 aa, Glycine max
  Clone ID: PAT_MRT3847_97862C.1.pep
LTPTLSILFFSPNTYIHSRRFSKIVGLYTIILIIIPDTYIIYHLVNMLTNFHTQTHIDNVLILHIIIPSILSSLNNHIIQL

SEQ ID NO: 283322 - protein, 135 aa, Glycine max
  Clone ID: PAT_MRT3847_97863C.1.pep
MLVLSALRQFCFSPCISPNSSVSFFLHLCVMARGSSQSQSSTSTATRPGPAGMAPRGSAAATAGMRRRRLGGGNSSASTGVGGGSSNMLRFYTDDAPGLKISPTVVLVMSLCFIGFVTALHVFGKLYRSKSGGAV

SEQ ID NO: 283323 - protein, 52 aa, Glycine max
  Clone ID: PAT_MRT3847_97864C.1.pep
LIKHLSQLSFDKMFNIHNQPLQKYKPFSLNQEGKNYFLVILLKNFNGNANFF

SEQ ID NO: 283324 - protein, 207 aa, Glycine max
  Clone ID: PAT_MRT3847_97865C.1.pep
GSRVIFAEMFVIVSFLFKTPARKLVIVTLDRLKRGRGPVVVKTVAATLLVVLASSLYSIAKIRHRNLDAPVANPTDQVLVYKHMLEASLMDRLHHYIRELRLLRKAMEAAKKQSRSFEGGKSVSAAEHKALVEEIAMLKPKIEKLESECEMEASKAKALETEVKALRKQSEGFLMEYDRLLADNQNLRSQVQAIDHSSPHSVNKKSM

SEQ ID NO: 283325 - protein, 119 aa, Glycine max
  Clone ID: PAT_MRT3847_97866C.1.pep
MLQLLYAVIFAEMFVIVSFLFKTPARKLVIVTLDRLKRGRGPVVVKTVAATLLVVLASSLYSIAKIRHRNLDAPVANPTDQVLVYKHMLEASLMGKSSFSLVYLLLRGIFDALKLCTKQ

SEQ ID NO: 283326 - protein, 67 aa, Glycine max
  unsure (1)..(67): unsure at all Xaa locations
  Clone ID: PAT_MRT3847_97867C.1.pep
LLCPKISSWQEEFVVSVLDVVVVVVVVKMMMGGCGWCFVIQISFLFXDRVVREHVLIVIRTNSVFCP

SEQ ID NO: 283327 - protein, 38 aa, Glycine max
  Clone ID: PAT_MRT3847_97868C.1.pep
EQKPEAYLNDKKSYEQYMTKGPGHSKKQRLTIIHRIPN

SEQ ID NO: 283328 - protein, 221 aa, Glycine max
  Clone ID: PAT_MRT3847_97869C.1.pep
MLQLLYAVIFGEMFVIASFLFKTPARKLVIITLDRVKRGRGPVVVKTVAATLLVVLASSLYSIAKIRRRNLDAPVVNPTDQVLVSKHMLEASLMGFVLFLSLMIDRLHHYIRELRLLRKAMEAAKKQSRSFEDGKSVSAAEHKALLEENAMLKPKIEKLESECEVEASKAKALETEVEALRKQSEGFLMEYDRLLADNQNLRSQLQAIDHSSPHSVNKKSM

SEQ ID NO: 283329 - protein, 153 aa, Glycine max
  Clone ID: PAT_MRT3847_9786C.1.pep
MLSFILMLLWSCVECKNHPHPQDPLTPSEFNDVRTIVQNAYPTSHNLTFHYVALDEPNKSELLSWLSSNPKTKPTPSSPTPPRRAFAIVRSQKQSHEITVDLSTRSIVSTKVYEGNGYPMLTLGEIAVATRLPFSYEPFKESVTKRGLNISLV

SEQ ID NO: 283330 - protein, 47 aa, Glycine max
  Clone ID: PAT_MRT3847_97870C.1.pep
ANQTKKTIFRILKCICEGEAEAENNVHSRGMILNRTRDLSSNPCVSN

SEQ ID NO: 283331 - protein, 45 aa, Glycine max
  unsure (1)..(45): unsure at all Xaa locations
  Clone ID: PAT_MRT3847_97871C.1.pep
ELGPAGKSLKAESHVPTLGPGFWRAPRLKPCSPTXXPXLTGAPGD

SEQ ID NO: 283332 - protein, 150 aa, Glycine max
  unsure (1)..(150): unsure at all Xaa locations
  Clone ID: PAT_MRT3847_97872C.1.pep
MESRVHLPCSNDVVVHVNGDSAPDARRFHPTNDAFPPQQQQQQHQEHGKERRGSLVLAYKTLGVVFGGLVTSPLYVYPSMPLKSPTEDDYLGIYSIMFWTLTLIGVVKYANVAIRADDHGEGGTFALXSLLCRHVNIGILPFKHVGLNTT

SEQ ID NO: 283333 - protein, 347 aa, Glycine max
  unsure (1)..(347): unsure at all Xaa locations
  Clone ID: PAT_MRT3847_97873C.1.pep
MADAEDIQPLVCDNGTGMVKAGFAGDDAPRAVFPSIVGRPRHTGVMVGMGQKDAYVGDEAQSKRGILTLKYPIEHGIVSNWDDMEKIWHHTFYNELXVAPEEHPVLLTEAPLNPKANREKMTQIMFETFNVPAMYVAIQAVLSLYASGRTTGIVLDSGDGVSHTVPIYEGXYALPHAILRLDLAGRDLTDHLMKILTERGYMFTTSAEREIVRDMKEKLAYVALDYEQELETAKSSSSVEKSYELPDGQVITIGAERYQEGSVLFQPSMIGMEAAGIHETXRMSKEITALAPSSMKIKVVAPPXERKYSVWIGGSILASLSTSRDQMWISKGEYDESGPSIVHRKCF

SEQ ID NO: 283334 - protein, 112 aa, Glycine max
  unsure (1)..(112): unsure at all Xaa locations
  Clone ID: PAT_MRT3847_97874C.1.pep
LYTALGNPVLPGWVSSAGDPCGQGWQGVQCNGSVIQEIILNGANLGGELGDSLGSXVSIRAIVLNNNHIGGSIPSSLPVTLQHFFLSDNQFTGSIPASLFTLTRLTDMSFND

SEQ ID NO: 283335 - protein, 192 aa, Glycine max
  Clone ID: PAT_MRT3847_97875C.1.pep
YSWRKYGQKDILSAKYPRSYYRCTFRKTKGCFATKQVQRSEEDHTIFDITYRGSHTCKRNDAVLPPKSPDYTHAAPVTVKTDNITAPSASFGCMAQDNYHDLFPSLADSARAFFSTPSQTSSLSANTPESNYFVSPTFLEHEFDGVCNKPCPDSELARLVSADTSITSSPIFDFNFSLDAVGIDYPNFPFNI

SEQ ID NO: 283336 - protein, 377 aa, Glycine max
  Clone ID: PAT_MRT3847_97876C.1.pep
MADAEDIQPLVCDNGTGMVKAGFAGDDAPRAVFPSIVGRPRHTGVMVGMGQKDAYVGDEAQSKRGILTLKYPIEHGIVSNWDDMEKIWHHTFYNELRVAPEEHPVLLTEAPLNPKANREKMTQIMFETFNVPAMYVAIQAVLSLYASGRTTGIVLDSGDGVSHTVPIYEGYALPHAILRLDLAGRDLTDSLMKILTERGYMFTTSAEREIVRDMKEKLAYVALDYEQELETAKSSSSVEKSYELPDGQVITIGAERFRCPEVLFQPSMIGMEAAGIHETTYNSIMKCDVDIRKDLYGNIVLSGGSTMFPGIADRMSKEITALAPSSMKIKVVAPPERKYSVWIGGSILASLSTFQQMWISKGEYDESGPSIVHRKCF

SEQ ID NO: 283337 - protein, 55 aa, Glycine max
  Clone ID: PAT_MRT3847_97877C.1.pep
ALLKLIQRVLFYHHIITLKIAVLPFIIGIDNTLFIFLTPKLKYTMIYLIFQLLIY

SEQ ID NO: 283338 - protein, 110 aa, Glycine max
  unsure (1)..(110): unsure at all Xaa locations
  Clone ID: PAT_MRT3847_97878C.1.pep
QXXRXXVXXDXXXXNSMVLFGDVVVDLDTHHCGEKVNYSSNKDMSVVVNEKHGSGSSTSTTIINNKLASIGRALQKRPISVSMRMRRSFSHNTKFLFSRHCRSQSSTLPL

SEQ ID NO: 283339 - protein, 215 aa, Glycine max
  Clone ID: PAT_MRT3847_97879C.1.pep
MGNLFVKKPKVTDVDKAILALKTQRRKLAQYQQKLDAVIEAEKQAARDLIREKKKDRALLALKKKKTQEELLKQVDAWLINVEQQLADIELASKQKAVFESLKAGNDAMKAIQSEINIEDVQKLMDDTAEAKAYQDEINEIMGEKLSAEDEEEILAEFEDLEIQLTVQDLPEVPPSANEEIEEKLDLPDVPTKAPVTSDAEVSTKRKVMEEPLAA

SEQ ID NO: 283340 - protein, 75 aa, Glycine max
  Clone ID: PAT_MRT3847_9787C.1.pep
ARTGSIREILGACVSVGRSVDGKHQRDLQQEISDGHVEVPPEGGRRLCFSLVCLLSNVRFVFIKYKSGQTSERFV

SEQ ID NO: 283341 - protein, 166 aa, Glycine max
  Clone ID: PAT_MRT3847_97880C.1.pep
MGNLFVKKPKVTDVDKAILALKTQRRKLAQYQQKLDAVIEAEKQAARDLIREKKKDRALLALKKKKTQEELLKQVDAWLINVEQQLADIELASKQKAVFESLKAGNDAMKAIQSEINIEDVQKLMDDTAEAKAYQDEINEIMGEKLSAEDEEEILAEFEDFGNQLT

SEQ ID NO: 283342 - protein, 140 aa, Glycine max
  unsure (1)..(140): unsure at all Xaa locations
  Clone ID: PAT_MRT3847_97881C.1.pep
MAKRNCVVILSSEDEEEDGFIVRSLSSSHSYNTKTKSKSKSTSASSRGRKRARASASRSHLSKLHEIDLFGDDFNEVFTGSKVSAGTHRHYAEDLWIDKYKPCSLEELAVHKKKVERVKTWFGERVETFKGCLXNNVLVI

SEQ ID NO: 283343 - protein, 73 aa, Glycine max
  Clone ID: PAT_MRT3847_97882C.1.pep
LRNTKPFSLPAICKPLPLAISSDLHKQYRPWRLRFLTFPAPGQFPLFYKKKKNKIYKKHFKKKKKKKKINERI

SEQ ID NO: 283344 - protein, 80 aa, Glycine max
  Clone ID: PAT_MRT3847_97883C.1.pep
ILSIVLLIDETWKNNPILPSDPYQRALARFWSKFIDDKVFGAAWKYFITADDKDHDKNVEEAMEALHLLDNEIYDIKFFG

SEQ ID NO: 283345 - protein, 79 aa, Glycine max
  Clone ID: PAT_MRT3847_97884C.1.pep
FSVEYGSMVEDPMVLFIQNSAMDQCKGTLYVQWVFHLVISMDLRPLQSPLSMDREQHRAPLHSSCKVMHKAKKIKKKIK

SEQ ID NO: 283346 - protein, 57 aa, Glycine max
  Clone ID: PAT_MRT3847_97885C.1.pep
NTRVYHIKNMYRVHSISTKLSQENKQLSVSIGSEYIDSRHTHGKFGAPTIEMLMINR

SEQ ID NO: 283347 - protein, 40 aa, Glycine max
  unsure (1)..(40): unsure at all Xaa locations
  Clone ID: PAT_MRT3847_97886C.1.pep
FPGSTPRRLVPRPSRNFDWGYLIAYNCLARGFXXFKGCWG

SEQ ID NO: 283348 - protein, 68 aa, Glycine max
  Clone ID: PAT_MRT3847_97887C.1.pep
NMVNQRESIQNFKIHINQLQILDKPRRLYNFKTLPRSCKRRRQNLYLLGSDMAVSSQVPTRRRRWRAE

SEQ ID NO: 283349 - protein, 41 aa, Glycine max
  Clone ID: PAT_MRT3847_97888C.1.pep
RKTIKYECLFISHDCSLSTPTSNYHHEDVPLKKNTRFTVFF

SEQ ID NO: 283350 - protein, 61 aa, Glycine max
  Clone ID: PAT_MRT3847_97889C.1.pep
MTEPTFSLQDTGFSCMKCSQMEPAPDLFCEICGILIHSQCSPWVEIPSRLGSWRCGNCRDW

SEQ ID NO: 283351 - protein, 180 aa, Glycine max
  Clone ID: PAT_MRT3847_9788C.1.pep
PPPASPLVPVCSPPHPPPWVWVDSSPPPLGAFFGPLFAPVWVPPVPPPPRAPVFSSPRVPPGPPVLFSSPVPWETGECPGFPPRCGGEKLPGLFPVPLAHGLRLVSFAPPLFFCPLFRSSFPGLFDLFFFGGGAFVGFFFFFFLCPLLCLGLFLFWCLWFPPVLSFLGFVLSPPFRNLYF

SEQ ID NO: 283352 - protein, 120 aa, Glycine max
  Clone ID: PAT_MRT3847_97890C.1.pep
KDKVSRAPRTGSVGALKSSNIQPSSTTFPGSSIHPMTQWVGQRPPKNSRSRRVKVVSPASRNLEVQVSFEGCLTSEFCVKASSAGNNGFQLASSADNSTPKYKRPPDDTSSPFGLSESEE

SEQ ID NO: 283353 - protein, 72 aa, Glycine max
  Clone ID: PAT_MRT3847_97891C.1.pep
LLLFSVTAMDSFPTLLSFAVISFTVALLYLRRVFRPPSVPLPPEARPTLIDERAVISAYKSEIRAFMTTLDV

SEQ ID NO: 283354 - protein, 182 aa, Glycine max
  Clone ID: PAT_MRT3847_97892C.1.pep
MKGKNRRSGGVVHMEYLIHIQEIKPWPPSQSLRSLRSVLIQWENGDRSSGSTGVVSPSLGPNSAPGEAKLEFNESFRLPVTLSRDMSIRNSTAAVFQKNCLEFHLHETRRDKTTKGQLLGTAIIDLADCGVLRETLSIRTPLNCQRNYRNTDQPLWFIQIEPVEKSRPKSSLKDSLTKGNNG

SEQ ID NO: 283355 - protein, 96 aa, Glycine max
  Clone ID: PAT_MRT3847_97893C.1.pep
PLSRGFPRGSFLFTFQQRISLVVSQGAVFLRKLPPLFVFCVKPSPPPSFLVSPRFTPPSPRFFFFAPVWPFFKNFVPCFPSKTFFIPFFSSLPPPF

SEQ ID NO: 283356 - protein, 50 aa, Glycine max
  unsure (1)..(50): unsure at all Xaa locations
  Clone ID: PAT_MRT3847_97894C.1.pep
TLVPQRTMHILFLRSXMQRIISFGXTRLNLLFVVIILKAISLIRRFHXXX

SEQ ID NO: 283357 - protein, 103 aa, Glycine max
  Clone ID: PAT_MRT3847_97895C.1.pep
PIQKGLLHRPTSKTARKALHCLIPTLSGLWSKYPNKSPARSDISALFLSMKPVWIIIMGFRLHAFQGVSVLAQVFLEPYMLSIESSPLVHMSLDLIPAESYNL

SEQ ID NO: 283358 - protein, 75 aa, Glycine max
  Clone ID: PAT_MRT3847_97896C.1.pep
MEANEKCDVYSFGILALEIVFGEHPGGDVTSSCAATSTLDHMALMDRLDQRLPHPTSPTVVELISIVKIAVSCLT

SEQ ID NO: 283359 - protein, 446 aa, Glycine max
  unsure (1)..(446): unsure at all Xaa locations
  Clone ID: PAT_MRT3847_97897C.1.pep
MDSGNSGSMQSSSTAGDEEYDSRADPSSSSSISAFFINSNPHPPPQQTTLATHVVGPPFSSQHHVFDPLSNYXSDTKTAAIKPNPQPGHGEQEVKVNHAEEELTTLPXPSTTLPLESGGGLPVNEQVNSSSTNTVVRNPKKRSRASRRAPTTVLTTDTTNFRAMVQEFTGIPAPPFTSSSSSSFPRTRLDLFASSNSIASSSSSSIIREQTQTPPYLLRPFAHKVQAQLPSSIPPPSSFPPMLNNYQQHSLNMQQNPILSFQSILQPQPLIGSKTQQPSLEIPPSAVDSSHLKMGGLEELGLSNAHDGGHHQNFNMVSSSSDGALSRVTNSNMRGGPSSADWALSQAQRIDNNDGGVLRSLGGATATLNYRSNVSDPRVKVTNNNSDFHGDKGPECAVAARSEAMVESCLEGSPVDRMYNVQHRLNNTDKTILGVIGGKIWGIDYD

SEQ ID NO: 283360 - protein, 76 aa, Glycine max
  Clone ID: PAT_MRT3847_97898C.1.pep
GREIVCNLKKLQRNVNAICSKNKQTNKRFSNLFNKAQTRSTTTRSHQYTSIRSKGKLYPSSKFTQYNLDKLKPNVI

SEQ ID NO: 283361 - protein, 44 aa, Glycine max
  Clone ID: PAT_MRT3847_97899C.1.pep
KLDYGPGFRDKEYGVTKSSFKFKGGKSQPNRFYRNWVGTQGLRK

SEQ ID NO: 283362 - protein, 54 aa, Glycine max
  Clone ID: PAT_MRT3847_9789C.1.pep
LMIRVCLQKWKISRKILIRYYMLPILLNRWDYMHWITNCVYICYSQLKVEVLCC

SEQ ID NO: 283363 - protein, 283 aa, Glycine max
  Clone ID: PAT_MRT3847_978C.1.pep
MLQGETYSASYQRVSFYLFSSSFGSRISARESPSIFFLLQFIPMAIPLPSLDLTHHSDFEPLVSPDGYISICGYGSLLSETSARTTFPDLVNFRIARLTGFRRLFNSVGRIFFTHRVANIKTQEIAGLSVEPCDGEFVVVAVFEIKNTEIPAFIEREREYRFLAVVPETLDGKPFINPAVLCASYTDEEFFKFRCSEGREKYFEQYGEYKIHKIWRDDVFPCRVYLRHCVLAAKSLGDEVHNNFLDHTFLADRKTTIRQYFEKVGTSILEEEPPESLKTRYGG

SEQ ID NO: 283364 - protein, 58 aa, Glycine max
  Clone ID: PAT_MRT3847_97900C.1.pep
TPTYNLLNVDFFICCSKSLTYQSAHIFFQHVAAISRKTLSSPGSRVHKKIVESPLPSP

SEQ ID NO: 283365 - protein, 61 aa, Glycine max
  Clone ID: PAT_MRT3847_97901C.1.pep
IPSNPTKEKLACLSRGHRQETLPHIVKREKEEPSPSLCSLTTASCKSHATEYAWPDAWADA

SEQ ID NO: 283366 - protein, 147 aa, Glycine max
  Clone ID: PAT_MRT3847_97902C.1.pep
SSLIGSRLLVLSCIEAIVTATLASPFSTSANANARAYGGLEAEDCQIRCPLSTEPGQVVLPALTQYKNASGEWENTIECWQVDTVSTELPGIDNAFRLDWEGGFDAAYQYVFYGQSFMPAHPAPEPSLIVMSSGIGDLRVPSRRCLR

SEQ ID NO: 283367 - protein, 112 aa, Glycine max
  unsure (1)..(112): unsure at all Xaa locations
  Clone ID: PAT_MRT3847_97903C.1.pep
MAMSRVDNRNSSATKRARTDGXTCNMRNCTQPRPADHNSKSAAKPLQAPQGYSSSAPYLGSNTPSSIYLGVPPYGSSLFNGSSVPPYDVPFSGGSAYHYNYGSRLSAGSPYR

SEQ ID NO: 283368 - protein, 72 aa, Glycine max
  unsure (1)..(72): unsure at all Xaa locations
  Clone ID: PAT_MRT3847_97904C.1.pep
VCESXKXXSRSRFTECQFLQLEDVWCFWRGQSRSPNSLLVSFQGLPRRWFFFFLHKCHIQWAMICYVVPLLR

SEQ ID NO: 283369 - protein, 155 aa, Glycine max
  Clone ID: PAT_MRT3847_97905C.1.pep
PRVRNLPRIVLMYYANFLSSPEGYFHTVICNADEFRNTTVNHDLHFISWDNPPKQHPHFLTVDDYQKMVDSNAPFARKFGRNEPVLDKIDTELLGQNAVGYVPGRWFSQANSSITNKYSGIRNITDLRPGPGAERLGRLINGLLSAENFHANQCS

SEQ ID NO: 283370 - protein, 297 aa, Glycine max
  unsure (1)..(297): unsure at all Xaa locations
  Clone ID: PAT_MRT3847_97906C.1.pep
MYSFTTIQKSAAKPLQAPQGYSSSAPYLGSNTPSSIYLGVPPYGSSLFNGSSVPPYDVPFSGGSAYHYNYGSRLSAGSPYRPLHLSGPTPYTGGPVIGNGGIYGMPQLLDRYGLXIPIGPGTMGARPXFFHDDQSQXKECTRDNDWTCPKCGNVNFSFRTVCXMRKCTTPKPGXQASKSDKNSKQKMPEGSWKCEKCNNINYPFRTKCNRQNCGADKPAESEKSPSPAADQNDQVCCVKYFHDDLHSLLLQLVFQEKKSNIMNIFIWQSVVKLSFKWIIRKSFSFASFHLEPFITPF

SEQ ID NO: 283371 - protein, 283 aa, Glycine max
  unsure (1)..(283): unsure at all Xaa locations
  Clone ID: PAT_MRT3847_97907C.1.pep
MSRVDNRNSSATKRARTDGSRREDDWTCPSCGNVNFSFRTTCNMRNCTQPRPADHNSKSAAKPLQAPQGYSSSAPYLGSNTPSSIYLGVPPYGSSLFNGSSVPPYDVPFSGGSAYHYNYGSRLSAGSPYRPLHLSGPTPYXGGPVIGNGGIYGMPQLLDRYGLGIPIGPGTMGARPGFFHDDKSQKKDATRDNDWTCPKCGNVNFSFRTVCNMRKCNTPKPGSQASKSDKNSKQKMPEGSWKCEKCNNINYPFRTKCNRQNCGADKPAESEESPSSAADQNDQ

SEQ ID NO: 283372 - protein, 83 aa, Glycine max
  Clone ID: PAT_MRT3847_97908C.1.pep
ESIFSISSSSRVIEHLLRIMPLYVGSCYHLDIMRTISQDRTNEEKNPPRDEVLAGMTIGALGFRAEILTENNAITTWQVVTVH

SEQ ID NO: 283373 - protein, 48 aa, Glycine max
  Clone ID: PAT_MRT3847_97909C.1.pep
KSFYKRNHFLPLNVCTKFVCNLVSFQKLVLFLLINACFKKNNNFGAIF

SEQ ID NO: 283374 - protein, 261 aa, Glycine max
  unsure (1)..(261): unsure at all Xaa locations
  Clone ID: PAT_MRT3847_9790C.1.pep
MEASAGLVAGSHNRNELVVIHGHEEPKALKNLDGQVCEICGDGVGLTVDGDLFVACNECGFPVCRPCYEYERREGKXHLCPQCKTRYKRLKGSPRVEGDDDEEDVDDIEHEFNIDEQKNKHGQVAEAMLHGRMSYGRGPEDDDNSQFPTPVIAGGRSRPVSGEFPISSNAYGDQMLSSSLHKRVHPYPVSEPGSARWDEKKEDRMDDWKLQQGNLGHEPDEDPDAAMLDEARQPLSRKVPIASSKINPYRMVIVARLXILA

SEQ ID NO: 283375 - protein, 166 aa, Glycine max
  Clone ID: PAT_MRT3847_97910C.1.pep
YRVSNYHDEAELATSQVNAKEEKLGKPEGNDLPDTKSKKRKTNRMENAVRRKRKSLSGLSDVNVNTSNGDSQRPGRKLKQKRKVEEVTLVHQLQNVEINFIGVSSKYSSAPQAAQNLCCLASEGKSEHNQREKIEAQEHQTAQINSVYTDAKKLNCSSLVIDLQFT

SEQ ID NO: 283376 - protein, 186 aa, Glycine max
  Clone ID: PAT_MRT3847_97911C.1.pep
EAAMDVVLTLGREDTNSVDETKMTEDTILTEEAPEKLEGCFDSRDRRKSKYLSYPYIGPNQKDLPAETEDLKTPCPSQKARASSVTTNPLNGSSSYAKLGSKRFRNSWYKKFISCNTMPSHYNFMNASAEELLSGLCSTAVDCMFPVGNKSFDLVEWVFCRIRVSNYHDEAELATSQVNAISRKIG

SEQ ID NO: 283377 - protein, 379 aa, Glycine max
  unsure (1)..(379): unsure at all Xaa locations
  Clone ID: PAT_MRT3847_97912C.1.pep
STHASAYIGPKQKDLPAETDDLKTPCPSQKAGASSVTTNPLNGSSSYAKLGSKRFRNSWYKKFISCNTMSSHNKFMNSSAEELLSGLYSTAVDCMFPVGNKSFDLVERFFCRYRVSNYHDEAELATSQVNAKEEKLGKSVCNDLLDTKSKKRKNNKIENAVRRKRKSLSGLSDVNVSTSNSDSQKPXRKLKQKRKVEEVTSVHQPQNVEINLIGNSSKYSSTPQASQNLCCLASEGKSEHNQREKIEAQEHQTAQINSVYTDAKKLNCSSLVIDLQFTPPAIPVDIPERNRSENTEEIVLLASNPESRVSQEGPVGSITDHSLLVSTKAEVGTVMVNKTGLMNSMGKATGLHLNTKLAVGVPLNSMGKAAAAGVHLNAT

SEQ ID NO: 283378 - protein, 69 aa, Glycine max
  unsure (1)..(69): unsure at all Xaa locations
  Clone ID: PAT_MRT3847_97913C.1.pep
DAQLTRSSDTLTKCKKKEKKNHWLLCVYNIYYSLYLSHLYPERIFSXHHHFASFTGSRSCHRSFVGIFR

SEQ ID NO: 283379 - protein, 51 aa, Glycine max
  unsure (1)..(51): unsure at all Xaa locations
  Clone ID: PAT_MRT3847_97914C.1.pep
GTPSPKNFGRLMFKFKKKFGPHPEGLCPKVQCFKSISVCPIPXXXKNPFXX

SEQ ID NO: 283380 - protein, 66 aa, Glycine max
  unsure (1)..(66): unsure at all Xaa locations
  Clone ID: PAT_MRT3847_97915C.1.pep
CCVEMMKITHFSSTIFPELLVFYLFSGMKLYEEQRMAENRSXRSSMLLTEALNQRHSEKVPSDKDL

SEQ ID NO: 283381 - protein, 92 aa, Glycine max
  Clone ID: PAT_MRT3847_97916C.1.pep
SLLVCGSPARRTSRWRLGRRSLGPRCSSYAAGTPLGCGPGPAASATIVEALLGNYLSFGVLIITIKNALVCIQTKKHRENLSEVGGNQMLSL

SEQ ID NO: 283382 - protein, 66 aa, Glycine max
  Clone ID: PAT_MRT3847_97917C.1.pep
NSARAAILFAFVLHIGGKGLWLGIICALVVQVSCLLIITIRTDWEQEAKKVKDRVYDSMRAEVIVS

SEQ ID NO: 283383 - protein, 93 aa, Glycine max
  Clone ID: PAT_MRT3847_97918C.1.pep
LTSCGKNSTCVTGVTNSNCLNTEVAFISFGLGSYTSSTFLAPGSAISLSLGKSLFFEERFQGMIRVCVPFSMHDPEKVTICSYSYSRFQYAEW

SEQ ID NO: 283384 - protein, 38 aa, Glycine max
  Clone ID: PAT_MRT3847_97919C.1.pep
LELTKKQISKLATTWCPRTGYSHSLECPNKMVGTWTTP

SEQ ID NO: 283385 - protein, 43 aa, Glycine max
  unsure (1)..(43): unsure at all Xaa locations
  Clone ID: PAT_MRT3847_9791C.1.pep
HLITYKYFQIGALTSLYXFSFISQHITINISTLILPNLFIYHS

SEQ ID NO: 283386 - protein, 95 aa, Glycine max
  Clone ID: PAT_MRT3847_97920C.1.pep
GVYCVKKPKPFYGVHQFSFNPYFVLGLSPHFVCFSPQPPWDCGVSPSFPNGAPPRPLSLFAQKDFLYRSHHAGILVSRLIFSPWAFRLLRFWGGG

SEQ ID NO: 283387 - protein, 191 aa, Glycine max
  unsure (1)..(191): unsure at all Xaa locations
  Clone ID: PAT_MRT3847_97921C.1.pep
GSRVQSTEDPSEVFKRNAINKLVEMVHGDVAALRKTREDEMEGLFSLQGVLKQREESLNRGVKEMQQEMEALEQQLQMVLINTDVLEGWLRDNRGEXMAGLENPEDAFECADVLSKQMLDCTAADLAIEDTLYALDKALQVGGVPFDQYLRSVRALSREQFFHRATAAKVRAAQLQAQVANMAARSQHYGC

SEQ ID NO: 283388 - protein, 64 aa, Glycine max
  Clone ID: PAT_MRT3847_97922C.1.pep
VTKLALLRPDGHPGPYMNPFPFAKGVPERVQNDCVHWCLPGPIDTWNEIFLEMIKKWEEQQRER

SEQ ID NO: 283389 - protein, 52 aa, Glycine max
  Clone ID: PAT_MRT3847_97923C.1.pep
DFEGRLFYSSPIFHSLLLTDPHCRTKWSYLKNTWASGQMTASVTLSGETGLL

SEQ ID NO: 283390 - protein, 230 aa, Glycine max
  unsure (1)..(230): unsure at all Xaa locations
  Clone ID: PAT_MRT3847_97924C.1.pep
MKNISHRVLLLALFLASFTFISSTSTQQQEAKHDPIAINMETKVGTQRKLLGYVPEAKKAALQNLEDVLLEPPRAASGKSRVYLKRTKYLPDLMGDSLESYPRRVFIDVGLPEKDGGSATDWFRKTYPTRNKDFEMYKIETVAEGGPQIEMSDWLRKNLREEEXVVMKSETEVVEEMMRSKAIMLVDELFLECKPQQGNRKRKNGRAYWECLALYGKLRDEGVAVHQWWG

SEQ ID NO: 283391 - protein, 218 aa, Glycine max
  Clone ID: PAT_MRT3847_97925C.1.pep
MMESQNQNLLRQPLINSTHHHHHSADSRLEEVLSDPTLPWSKRILSATWIELNLLFPLAAPAILVYVFNNLMSNVTRAFAGHLGNLELAAANLGNSGIQLFAYGLMLGMGSAVETLCGQAYGANKYEMLGIYMQRAIIVLTITGIPLTVVYIFCKPILLLLEEPPGIASVTAIFIYCLIPQMLAYAINFPIQKCLQSQNIVSPITYMCSATLSLDVTL

SEQ ID NO: 283392 - protein, 42 aa, Glycine max
  Clone ID: PAT_MRT3847_97926C.1.pep
AFLPLNPRNEKGPPAAPPPAPPPAPPRPPPPPPPKKVVVLDV

SEQ ID NO: 283393 - protein, 297 aa, Glycine max
  Clone ID: PAT_MRT3847_97927C.1.pep
MRRGGPCAVAIKIIRSNDTMYKAGMDELVILKKLVGADPDDKRHCVRFLSSFRYRNHLCLVFESLNMNLREVLKKFGRNIGLRLTAVRAYAKQLFIALKHLRNCGVLHCDIKPDNMLVNESKNVLKLCDFGNAMFAGKNEVTPYLVSRFYRAPEIILGLPYDHPLDIWSVGCCLYELYIGKVLFPGLTNNDMLRLHMELKGPFPKKMLRKGAFTEQHFDQDLNFLATEEDPVTKKTIKRLILNIKPKDIGTLITGSPGEDPKMLANFKDLLEKVFVLDPDKRLTVSQALNHPFITGK

SEQ ID NO: 283394 - protein, 50 aa, Glycine max
  Clone ID: PAT_MRT3847_97928C.1.pep
YKSGKFHPGALKPALAKSFKKILDPVREPFRKDTNAKKLLKKVKAFKAPK

SEQ ID NO: 283395 - protein, 49 aa, Glycine max
  Clone ID: PAT_MRT3847_97929C.1.pep
YNLLSLWRFNTGPANAGKTQPRWHLSAGCSCLLEKGKRVQLNMILDIQN

SEQ ID NO: 283396 - protein, 298 aa, Glycine max
  Clone ID: PAT_MRT3847_9792C.1.pep
MQIFIGRQGALVCFWLLSVFFVVTGFNNEEHRTVEVVGLGECADCRQNNIKNNHAFSGLRVTVDCKSRHGHFRTRGAGALDEYGNFKVSLPQDMVEDGELKEDCYAQLHSASAEPCPSHGNSKIVTRSVSEDTHTLAPAAGKLRFSSALCTSAFFWHFFKHHPEFPYPPKDDYSLPPPVPVYKEPLPPVPVYKKPPAPYKKPPISTPSPVVNKPCPPKEKTPSPTPIYKPLPPPTPIYKPLPPPTPIYEPTPTAPSPPYFKYFPPFHFKKPCPPLPKMEPPKFFYQHPWFGNWPPSHS

SEQ ID NO: 283397 - protein, 69 aa, Glycine max
  Clone ID: PAT_MRT3847_97930C.1.pep
SSGNVGTRGLTIDHINVSHGGYQNVIVNAYGANRSYSWERQSTAVLPSQSRVYRRRNQSHYIQWSSQLS

SEQ ID NO: 283398 - protein, 125 aa, Glycine max
  unsure (1)..(125): unsure at all Xaa locations
  Clone ID: PAT_MRT3847_97931C.1.pep
XKEGEEETGGEGVAXXKKRKKGKGKGKKAAAGGAAAAAAVAGAVPENETAEDKAEGIEPKKREGGGKKAGEKKVPKHVXGRREALAXRQEAEERXKREEEERGRREEEERXXRXELERQAEEARR

SEQ ID NO: 283399 - protein, 101 aa, Glycine max
  unsure (1)..(101): unsure at all Xaa locations
  Clone ID: PAT_MRT3847_97932C.1.pep
MDPCIFLNNEAMRKWQESTHSLVWLPIKCSSYSVLPCVFGLNHSYQVWEKIHEHFNLHTKSRARQLRTTMHAVSLEGKPIDXYLHKIKGYVDELAGVGVPI

SEQ ID NO: 283400 - protein, 77 aa, Glycine max
  unsure (1)..(77): unsure at all Xaa locations
  Clone ID: PAT_MRT3847_97933C.1.pep
PYDVCASTMRDASISQLIPVGVWATAMLHAYPXQQSMKLGINLYPVVEQLEHDNAAKVTGMLQEMDQAVVMHLLQSP

SEQ ID NO: 283401 - protein, 434 aa, Glycine max
  Clone ID: PAT_MRT3847_97934C.1.pep
MSPVPGAHAPLLPGSKSKDVPPATVSGAVFNVATSIIGAGIMSLPATLKVLGVIPALVLILVIAFLAELSVEFLMRFTRAGETTTYAGVMREAFGPLGAVAAQVAVVITNLGCLIMYLIIIADVFSGNQREGEVHLGILQQWFGIHWWSSREFALLVVLFLILLPLVLYRRVESLKFSSAISTLLAVAFVTICTVLAIVAIVEGRTQSPRLIPCLDQHTSFFDLFTAVPVVVTAYTFHFNVHPIGFELAKPSEMATAVRIALLLCCVIYFSIGLSGYLLFGDSTQSDILVNFDQNAGSALGSLLNVLVRLSYAFHVMLTFPLLNFSLRTNVDEFFFPKKSPLATDSKRFVSLTLVLLALSYIAAILVPDIWYIFQFMGSTSAVCLAFVFPGAIVLRDSYGISTRRDKIIALVMVILAAITSVIAISTNIYKAFQ

SEQ ID NO: 283402 - protein, 39 aa, Glycine max
  Clone ID: PAT_MRT3847_97935C.1.pep
FTFSGRATRSNHGNACLLTQSKAIAGPTFNSQARIQHAS

SEQ ID NO: 283403 - protein, 75 aa, Glycine max
  unsure (1)..(75): unsure at all Xaa locations
  Clone ID: PAT_MRT3847_97936C.1.pep
KLRLGLAQSKQDMKRFRTMALVTQEYGAISEYSSVTSEYGLNPSGSXSSEAQSRHTTRQMEMRKMRDKQGFSGSS

SEQ ID NO: 283404 - protein, 96 aa, Glycine max
  Clone ID: PAT_MRT3847_97937C.1.pep
MLTRNPNQIPEIPSVPKTEPPPPVPKEQPVLPTPEIDPFMPPEIVTDPPSTPFEPDAPKPPLSPPGPDMPLPKPPDTLPPRPPDTLPPHPPGPDIV

SEQ ID NO: 283405 - protein, 119 aa, Glycine max
  unsure (1)..(119): unsure at all Xaa locations
  Clone ID: PAT_MRT3847_97938C.1.pep
GSRLFVTGALKINGVPFXKGEPIXVIGTYTEVDIFGVNVDKLDDKFSAMVAKKMKTKGEGEVFKVYKEEKNVLPQEKREDQKTAVTTMLKAIDNVPHLKCYLGATLCLMAGMKADDLVL

SEQ ID NO: 283406 - protein, 114 aa, Glycine max
  unsure (1)..(114): unsure at all Xaa locations
  Clone ID: PAT_MRT3847_97939C.1.pep
MEFCPSCGNMLQYELPYMGRPSRFFCSACPYVCHIENRVEIKRKQRLVRKEIEPIFSEDDMTNAPSTEATCPFCGHGKAAFKEFQTRSADEPATLXYKCWNNDCKKQWREGDFN

SEQ ID NO: 283407 - protein, 63 aa, Glycine max
  Clone ID: PAT_MRT3847_9793C.1.pep
TAFINQMNNSFYRKLRKNSLLNISFLQDGIEACCIISSKKKIVACMIPLNFIYSIFIELISNF

SEQ ID NO: 283408 - protein, 111 aa, Glycine max
  Clone ID: PAT_MRT3847_97940C.1.pep
MEFCPSCGNMLQYELPYMGRPSRFFCSACPYVCHIENRVEIKRKQRLVRKEIEPIFSEDDMTNAPSTEATCPFCGHGKAAFKEFQTRSADEPATLFYKCLNNDCKKQWREG

SEQ ID NO: 283409 - protein, 223 aa, Glycine max
  unsure (1)..(223): unsure at all Xaa locations
  Clone ID: PAT_MRT3847_97941C.1.pep
MTTSFGGPATTSAPLKDTKLQIPSFHCFSSASASALSRNALSLPSSTRSFSLIRAVSTPAQSETATVKRSKVEIFKEQSNFIRYPLNEDMLTDAPNIGEAATQLIKFHGSYQQYNREERGSRSYSFMIRTKNPCGKVSNQLYLTMDDLADQFGIGTLRLTTRQTFQLHGVLKKDLKTGMATIIRNMGSTLGACGDLNRNVLAPAAPLVRKDYLXAHQTAENIA

SEQ ID NO: 283410 - protein, 687 aa, Glycine max
  Clone ID: PAT_MRT3847_97942C.1.pep
MTTSFGPATTSAPLKDHKVQIPSFHGLRSSSASALPRNALSLPSSTRSLSLIRAVSTPAQSETATVKRSKVEIFKEQSNFIRYPLNEDILTDAPNISEAATQLIKFHGSYQQYNREERGSRSYSFMIRTKNPCGKVSNQLYLTMDDLADQFGIGTLRLTTRQTFQLHGVLKKDLKTVMGTIIRNMGSTLGACGDLNRNVLAPAAPLARKDYLFAQQTAENIAALLAPQSGFYYDIWVDGEKILTSEPPEVVQARNDNSHGTNFPDSPEPIYGTQFLPRKFKIAVTVPTDNSVDILTNDIGVVVVTDDDGEPQGFNIYVGGGMGRTHRLETTFPRLAEPLGYVPKEDILYAVKAIVVTQRENGRRDDRKYSRLKYLISSWGIEKFRSVVEQYYGKKFEPFRALPEWEFKSYLGWHEQGDGKLFYGLHVDNGRIGGNMKKTLREVIEKYNLNVRITPNQNIILTDVRAAWKRPITTTLAQAGLLQPRFVDPLNITAMACPAFPLCPLAITEAERGIPNILKRIRDVFDKVGLKYSESVVVRITGCPNGCARPYMAELGLVGDGPNSYQIWLGGNHKQTSLARSFMDRVKILDLEKVLEPLFYYWKQKRQSKESFGDFTNRMGFEKLKEYIEKWEGPVVAPSRHNLKLFADKETYESMDALAKLQNKTAHQLAMEVIRNYVASNQNGKGE

SEQ ID NO: 283411 - protein, 80 aa, Glycine max
  Clone ID: PAT_MRT3847_97943C.1.pep
QSNNANNPPFWPLFCSSQSLHYFPLGLGLGVVESKSVNLTQMQTLGLLVAPVLGFYLRFLRFSLRFLLLMFMDFPSTFKF

SEQ ID NO: 283412 - protein, 47 aa, Glycine max
  unsure (1)..(47): unsure at all Xaa locations
  Clone ID: PAT_MRT3847_97944C.1.pep
LGFLDPXSNLPDQMLSTNQYLKKNILELFFSHYQKTIVSLMLKWLTK

SEQ ID NO: 283413 - protein, 47 aa, Glycine max
  Clone ID: PAT_MRT3847_97945C.1.pep
YLKAGPLLKRSGPRGQLEPPQGKGTTNPPLSPPRWFSNFIFINGFSG

SEQ ID NO: 283414 - protein, 68 aa, Glycine max
  Clone ID: PAT_MRT3847_97946C.1.pep
QNCSVPDSLCKLKHKYIGCEFAIECSTSVENYASKSIISTFHQYQMQIAHQDQLQEVSFFPCMHENII

SEQ ID NO: 283415 - protein, 73 aa, Glycine max
  Clone ID: PAT_MRT3847_97947C.1.pep
GPNSGRPRVRRRCLNTWTRDCDCWWLCCGLGLPVADRIEALVTMLYECCSDISVHMISDTKLIIKTICCQKGQ

SEQ ID NO: 283416 - protein, 338 aa, Glycine max
  Clone ID: PAT_MRT3847_97948C.1.pep
MDSSQGSTIAGFVDNASIKRNESSFDGVPVYVKELIAGGFAGALSKTSVAPLERVKILWQTRTPGFHSLGVYQSMNKLLKHEGFLGLYKGNGASVIRIVPYAALHFMTYERYKSWILNNYPVLGTGPFIDLLAGSAAGGTSVLCTYPLDLARTKLAYQVADTRGLIKDGMKGVQPAHNGIKGVLTSVYKEGGVRGLYRGAGPTLTGILPYAGLKFYMYEKLKTHVPEEHQKSIMMRLSCGALAGLFGQTLTYPLDVVKRQMQVGSLQNAAHEDVRYKNTIDGLRTIVCNQGWKQLFHGVSINYIRIVPSAAISFTTYDMVKSWLGIPPQQKSQSVSAA

SEQ ID NO: 283417 - protein, 68 aa, Glycine max
  Clone ID: PAT_MRT3847_97949C.1.pep
RLREDDRRGRERGERAKLEPWCCYIVFQPQSLQICFKSKPNSGFKPKPNYRLKPNASLIPEIRLKTSR

SEQ ID NO: 283418 - protein, 71 aa, Glycine max
  Clone ID: PAT_MRT3847_9794C.1.pep
VSPRVPVRRQIDTTLLHPTLSQLIQIWYGTEHRKWMPAVQPDRTRIPETGNTKWKGRANSDSAEIERERDK

SEQ ID NO: 283419 - protein, 34 aa, Glycine max
  Clone ID: PAT_MRT3847_97950C.1.pep
LARHIEWPRYQSSYAYLHASMSNILLGIIKLIVR

SEQ ID NO: 283420 - protein, 61 aa, Glycine max
  unsure (1)..(61): unsure at all Xaa locations
  Clone ID: PAT_MRT3847_97951C.1.pep
MSVSKKKKKKKKKKKKKKKKKKKKKKKKKKKNKNXKKNNDSKHAKKKKRHLLTLIDGGNLK

SEQ ID NO: 283421 - protein, 122 aa, Glycine max
  Clone ID: PAT_MRT3847_97952C.1.pep
RRYGAAAWSATQPGGTSPFPNSVRDHASYAFNKYYQKNPVPNSCNFGGAAVITSTNPRNNSPVLTSAPSRPFACPSFARRRLQMASYYFSVSKGLGHSAIHPGGIVYHTTAQRAQVPYVYSK

SEQ ID NO: 283422 - protein, 148 aa, Glycine max
  Clone ID: PAT_MRT3847_97953C.1.pep
NERQPLKTSQSSSVDFMDLSQQPSAATSSEKSLELSVPENEGWATFDMPQHTSTAQVEIQPAVQEKFDPFLNLNANTLWPCFETSSASALSSVTSNLWRDVTWTREEQVSVTASNSQSWSAFKDPANSVPVDALITQGSQMHDLPSTD

SEQ ID NO: 283423 - protein, 82 aa, Glycine max
  Clone ID: PAT_MRT3847_97954C.1.pep
ITTFLARHHKTPPPQNSYQQIHLPIPQKLLSFDDNTPNQTTKSVFQAQVSIFPRKQNLMIEGKGKTNRGILLTSYKACLQFQ

SEQ ID NO: 283424 - protein, 62 aa, Glycine max
  Clone ID: PAT_MRT3847_97955C.1.pep
VSMIQNGCIVSHGCAPLNSMSHMHGIRSTSAFRCASRRHLNVAVSDIWNYWGDTRECQNLLP

SEQ ID NO: 283425 - protein, 171 aa, Glycine max
  Clone ID: PAT_MRT3847_97956C.1.pep
MEEKLLIFVQGKRVAVKYYSDDWPTNNAKLAFEKFVFTKTVKTNARTEAEVTLLENNIIIYKFVQDLHFFVTGGEDENELILASVLQGFFDAVTLLLRSNVDTREALENLDLILLCLDEIVDGGMILETNGPLIAEKVTSHSLDADAPLSEQTLTQAWATAREHLTRTLLK

SEQ ID NO: 283426 - protein, 70 aa, Glycine max
  Clone ID: PAT_MRT3847_97957C.1.pep
NRTRTNILERLLGSIFLMTDMSHFINIIPLYLISATSTFLVIDVVSLTHHYLLLSLSISLSLSLSLSLSL

SEQ ID NO: 283427 - protein, 63 aa, Glycine max
  Clone ID: PAT_MRT3847_97958C.1.pep
LCSRIQCTLLSMNLIKVKFNLLGVTLVVYIAFRKIRILTTRKSTKWLMKSLTKRHTSRVSRFA

SEQ ID NO: 283428 - protein, 128 aa, Glycine max
  Clone ID: PAT_MRT3847_97959C.1.pep
AQRLHRPNSPHLSIYQPQLTWYPSIFNRITGVGLSGVLYAASLVYLFHPLYPALDSAHLISLVHSLPTWVKGGIKFVFAVPFTFHTFNGIRHLAWDTGFGLTIKGVYTGVYIVMAATAVSSIWLAFFV

SEQ ID NO: 283429 - protein, 63 aa, Glycine max
  Clone ID: PAT_MRT3847_9795C.1.pep
NLDNFYFSCYNCMIRLREKKIFYIAKKLKRKVWGEKREVLSNIKKFIHFKYQHPMTLVLDDSM

SEQ ID NO: 283430 - protein, 76 aa, Glycine max
  Clone ID: PAT_MRT3847_97960C.1.pep
LFSIDLLGGGILVDKTGDRVTLIQKSAISDSPRGAATNRGSARCTHAMAALGQPPPRPWSWEGHLLRINMERAETG

SEQ ID NO: 283431 - protein, 65 aa, Glycine max
  Clone ID: PAT_MRT3847_97961C.1.pep
MEEVFVAMKLVFSVAVVGILSWIFYVYGNLWHESQRVRKRLQMQGIKGPPPSFLHGNLPDMQRIQ

SEQ ID NO: 283432 - protein, 126 aa, Glycine max
  unsure (1)..(126): unsure at all Xaa locations
  Clone ID: PAT_MRT3847_97962C.1.pep
GAPHQIYLVQITYELSEGVKFDLARVEAPKEATLVXYNQCLETISKLEERIKEVEDNALRIHEHADIAEKEMKALKLQVTKLNEEKEDATLRYXQCLEIISSLEYKLSCAEKEARILNFKIVDGDE

SEQ ID NO: 283433 - protein, 78 aa, Glycine max
  unsure (1)..(78): unsure at all Xaa locations
  Clone ID: PAT_MRT3847_97963C.1.pep
TSFKVACVVAMMCLDVVMIVTPMAQGQLSCGHVAGDLFSCIRLLSCGGETSDACCSXVMYLSCTWKTTGDLQASCNCL

SEQ ID NO: 283434 - protein, 45 aa, Glycine max
  Clone ID: PAT_MRT3847_97964C.1.pep
QPIYHPNPQKHTIFQPIMIFSFFPTPFNTTLLYSQHTYLIHFFFY

SEQ ID NO: 283435 - protein, 56 aa, Glycine max
  Clone ID: PAT_MRT3847_97965C.1.pep
FRVLFTAGVSYCWVNLSASYNKLCCMMGDHISMLVVHHRAMPTIPERVCNWRMLTP

SEQ ID NO: 283436 - protein, 140 aa, Glycine max
  Clone ID: PAT_MRT3847_97966C.1.pep
RAATAEVYIITVLKGLKYRLAAGARLPNIIILLPVEETEVVSPKGKKIINLGGRAGQAVGALLRRLQIPHQGSESNGKLRIGGLALKKWFQPKLASPFSVNMGSPTFSGKPGDWNSSLSRLGKNISNQQRNIRIGNLSLD

SEQ ID NO: 283437 - protein, 78 aa, Glycine max
  Clone ID: PAT_MRT3847_97967C.1.pep
TAGACIMVADNNLKYNFNVKGTKPDTELSVMDTERAAYIISMYDNNGPESPTVEFAAGNADRDAQVTIVEHEPKFNRF

SEQ ID NO: 283438 - protein, 333 aa, Glycine max
  Clone ID: PAT_MRT3847_97968C.1.pep
MAHGAYSKRRVSATRRSNSKPLGIAKKPKPKPKPSVSLKNQIRSLERMLRKNLPPEVRDAQEQKLEALKKQQEIHTRLAAERKIFLRDRKIKFFERRKIERRIRRLEKLHRASSSSSSAAQPYPDQLSALKKDLQYVMHVPKNEKYVPLFTGGDDSEIVDRRNGLRKQIEDRLVAAAASGKDLEETGSEDDGLLDLSDDDFFLAGSSSDEADADDEWTDKSAREQASSASGKGVSGMSSDEKNQRQISARALMPPPRPSNMKLSRFGSSSGHNSSAQRSEISTSSNTSNSKSSSDFKVRPSRSGTGHGSSLSSNSDAHKPRRKRRPKKKKKQV

SEQ ID NO: 283439 - protein, 61 aa, Glycine max
  Clone ID: PAT_MRT3847_97969C.1.pep
KVHIFAMSLAHVQCTTRRSISSIYLQIKYLTRFIRERLYPGDPILTWSTLYLSKGQTKSRR

SEQ ID NO: 283440 - protein, 186 aa, Glycine max
  Clone ID: PAT_MRT3847_9796C.1.pep
MKASAVESSEISKGAPPRKGLIRGLSIMDFILRIVAAIATLGSALGMGTTRQTLPFSTQFVKFRAVFSDLPTFVFFVTSNSIVCGYLVLSLVLSFFHIVRSAAVKSKVLQVFLDTVMYGLLTTGASAATAIVYEAHYGNSNTNWFPFCRQYNRFCKQISGSLIGSFIAVVLFIILILMSAISISKH

SEQ ID NO: 283441 - protein, 128 aa, Glycine max
  Clone ID: PAT_MRT3847_97970C.1.pep
ILHKESYEEVLQPYYGVAVVNLTLGVLRDCLCVLSHADTFLDVWLMKDYGNKESWTKLFRVGNMHEADSYLYTKALCISEDDQVLMEFNSELAVYNSRNGTSKIPDIQDIYMYMTPEVYIESLISPCV

SEQ ID NO: 283442 - protein, 65 aa, Glycine max
  Clone ID: PAT_MRT3847_97971C.1.pep
WGGRQKQPPFKFFENSMKLIFVWLNYKALKRVSFSLTLTLTRISIERFLFKLKAGPFNNQKPEGF

SEQ ID NO: 283443 - protein, 44 aa, Glycine max
  unsure (1)..(44): unsure at all Xaa locations
  Clone ID: PAT_MRT3847_97972C.1.pep
TSRVPRIHYTLLLVTRVESLLLHHQSSTVTXTPKSLRRRTRVAL

SEQ ID NO: 283444 - protein, 91 aa, Glycine max
  Clone ID: PAT_MRT3847_97973C.1.pep
TGHFSTISLSHSLTFSTLMFLLGCSMILSPHHFLACHKSLGFKFKCQVRKVFRVNIKGLILHFYPLMQASQSTYQLTLSEFCLRQGWYLYI

SEQ ID NO: 283445 - protein, 59 aa, Glycine max
  Clone ID: PAT_MRT3847_97974C.1.pep
ALAVHVAEEVSNANRWVDWNFLAPNTMVFVIAEAGVALLPMVDAGWNSCETLSPLFAES

SEQ ID NO: 283446 - protein, 41 aa, Glycine max
  Clone ID: PAT_MRT3847_97975C.1.pep
VRTVVYCSVTDYDCMICIRILRDMYHEHPCFLSSLKSLTEH

SEQ ID NO: 283447 - protein, 183 aa, Glycine max
  unsure (1)..(183): unsure at all Xaa locations
  Clone ID: PAT_MRT3847_97976C.1.pep
KPVCDVALHFLQAGFRFHHAEPDYLMLVNWIPNTPDTLPANASHRVAVGAFVMNANREVLVVQESNGRFSGQGIWKLPTGGVDEGEDICTAAVREVKEETGIDTKFVEVIAFKERHKSFFRKSELFFICMLQPHSFKIQRQVSEIEAAQWMAIEDYMAQPFVREXELFDFLTKIGVSKFNGKY

SEQ ID NO: 283448 - protein, 54 aa, Glycine max
  Clone ID: PAT_MRT3847_97977C.1.pep
FCRQIASRVTLGGIKRIGKINLFMNVMKLRPSSLPSGPFCSHLTTVRTRGRTSG

SEQ ID NO: 283449 - protein, 109 aa, Glycine max
  Clone ID: PAT_MRT3847_97978C.1.pep
KWPCPRGLSPKRGSPTFSDPDRPKAKTRGFPPGAGIGKFGRLGQTLGTWNPRRRKRGTLLKLYKPPPSRGPFKTPPIRPRVLPKPKLAGNPNHKVFRGKKKNTNLVARV

SEQ ID NO: 283450 - protein, 50 aa, Glycine max
  Clone ID: PAT_MRT3847_97979C.1.pep
SMSLIFMFKDIYYLKKKQKRGALRLVTPPPGDLIRAGTLRGYKFPQKGAV

SEQ ID NO: 283451 - protein, 295 aa, Glycine max
  unsure (1)..(295): unsure at all Xaa locations
  Clone ID: PAT_MRT3847_9797C.1.pep
LFGNIPTEIGALSRLENLELAANNLGGPIPKQVGSLHKLLHLNLSNNKFTESIPSFNQLQSLQDLDLGRNLLNGKIPAELATLQRLETLNLSHNNLSGTIPDFKNSLANVDISNNQLEGSIPSIPAFLNASFDALKNNKGLCGNASGLVPCHTLPHGKMKRNVIIQALLPALGALFLLLLMIGISLCIYYRRATKAKKEEAKEEQTKDYFSIWSYDGKLVYESIIEATEGFDDKYLIGEGGSASVYKASLSTXQIVAVKXLHAVPDEETLNIRAFTSEVQALAEIKHRNIXKLIG

SEQ ID NO: 283452 - protein, 40 aa, Glycine max
  Clone ID: PAT_MRT3847_97980C.1.pep
GVWERHGRLRFQGAHQEVYQPLTILYSFTKYLPTNASVKC

SEQ ID NO: 283453 - protein, 63 aa, Glycine max
  Clone ID: PAT_MRT3847_97981C.1.pep
LRSRPRASMPITASPMHSSIAAVRWCSAASCSARRLRVTSSSTASDRRKRPCASRSMVADSST

SEQ ID NO: 283454 - protein, 53 aa, Glycine max
  unsure (1)..(53): unsure at all Xaa locations
  Clone ID: PAT_MRT3847_97982C.1.pep
QVLRFRKXSEMARXKXXXSXVQXEXRLLXSSWXQGWXXVCNNXWWCXXAPPLS

SEQ ID NO: 283455 - protein, 77 aa, Glycine max
  Clone ID: PAT_MRT3847_97983C.1.pep
HVCNIIKKKLRTPRGSSLCEGMGEGYCTQPYPCICKEAVSGFEPMTNKSPRHNFTAAPGLVLHVCNIINCTKFHVVN

SEQ ID NO: 283456 - protein, 43 aa, Glycine max
  Clone ID: PAT_MRT3847_97984C.1.pep
HDAFESILYSRTLCANLDDTNGMSSRSTCSNYNITNLHIDERK

SEQ ID NO: 283457 - protein, 72 aa, Glycine max
  Clone ID: PAT_MRT3847_97985C.1.pep
FWRVATKSLYKFLVMHSFALVARRKKKINFVLSELRIFYLLNLTLLVLHKRKFELDFSLNSLVFFGLGQTSF

SEQ ID NO: 283458 - protein, 45 aa, Glycine max
  Clone ID: PAT_MRT3847_97986C.1.pep
GLAVFVVDSVKAALSRQAHQVGCNVNRAVHLSGSLLEFSFGTHAW

SEQ ID NO: 283459 - protein, 44 aa, Glycine max
  unsure (1)..(44): unsure at all Xaa locations
  Clone ID: PAT_MRT3847_97987C.1.pep
XXFXXXSXLXXXPSXLXLSAXLXLXVXXXXXXXRAXFRXXYAAS

SEQ ID NO: 283460 - protein, 126 aa, Glycine max
  Clone ID: PAT_MRT3847_97988C.1.pep
MVQCSRRCELFDLHQELIPYDVAWSWQKDIVREKKSQIENEGDCSDTLIILQHPSVYTLGTASTHHNLNFDIENPPFPIYRTERGGEVTFHGPGQLIMYPIINLRRHKMDLHWYLRTLEEVVIRAL

SEQ ID NO: 283461 - protein, 39 aa, Glycine max
  Clone ID: PAT_MRT3847_97989C.1.pep
VMTSAICRNTIRHIVMAGLLLSAMNHHSALTTLISTQDG

SEQ ID NO: 283462 - protein, 96 aa, Glycine max
  unsure (1)..(96): unsure at all Xaa locations
  Clone ID: PAT_MRT3847_9798C.1.pep
MDLIQRGKVRTAVVSALQHACTDDISTNVATGYRLAXAAHTQAANITLNHELFEXHYFYPSRRYDVYSISSTKYVLCTLPKMQKLSKEVRVAIPNS

SEQ ID NO: 283463 - protein, 44 aa, Glycine max
  Clone ID: PAT_MRT3847_97990C.1.pep
GAISSGQTMYHNQINTPNGFSFGTSYVSHIALLPRSVRLHPRPS

SEQ ID NO: 283464 - protein, 86 aa, Glycine max
  unsure (1)..(86): unsure at all Xaa locations
  Clone ID: PAT_MRT3847_97991C.1.pep
PHTFFHSXSFYYRHHHSXTPLVFYKLTRHHNFLPFXXSHTLCNNSNHQPLFTHHFLYHPFLNLIHLHHHLFHFFPLLSTNISSLHH

SEQ ID NO: 283465 - protein, 75 aa, Glycine max
  Clone ID: PAT_MRT3847_97992C.1.pep
ITHTLCFYISVKCNYQLQQPGNGGIDSTATCHKLMGDLQAVFNALTKDMQQLMISNPQKASLLQGSPELTKLLTH

SEQ ID NO: 283466 - protein, 56 aa, Glycine max
  Clone ID: PAT_MRT3847_97993C.1.pep
VCMKSGPVLSRMDGKCHEPVFWKFGEEGNIYFRHATGQIYAISNDLAHSTCSINSP

SEQ ID NO: 283467 - protein, 37 aa, Glycine max
  Clone ID: PAT_MRT3847_97994C.1.pep
YNKLVGVSVLVRNCTAIFNIKLSLWQCRDEVHFQGLL

SEQ ID NO: 283468 - protein, 239 aa, Glycine max
  Clone ID: PAT_MRT3847_97995C.1.pep
MANVSIPLPRNGFSKPNYSTKRPCFTPSASTLRISCSGVAEFDGSHQKKGGLFNFNGIKGVACGILAACAVTSAAFPVTAATQRLPPLSTEPNRCERAFVGNTIGQANGVYDKPLDLRQCDFTNEKTNLKGKSLSAALMSDAKFDGADMTEVVMSKAYAAGASFKGVDFSNAVLDRVNFEKADLEGAIFKNTVLSGSTFDDAKLDNAVFEDTIIGYIDLQKLCTNKTIGDEWRVELGCR

SEQ ID NO: 283469 - protein, 144 aa, Glycine max
  Clone ID: PAT_MRT3847_97996C.1.pep
GFCVYKGDTYLVYEFAENDSLEDWLHSGSKKYENSTSLSWVQRVHIAHDVADALNYLHNYTSPPHVHKNLKSGNVLLDGNFRAKVSNLGLARAVEDHGDDGGFQLTRHVVGTHGYMAPEYIENGLITPKMDVFAFGVVLLELLF

SEQ ID NO: 283470 - protein, 112 aa, Glycine max
  Clone ID: PAT_MRT3847_97997C.1.pep
WGGFPPGGRFFFAARGGGGFSLQRAQLVATGICAGPFFITPPGEKRICCHMIKLGVAGAVPFFPMFNTGPRVSLFLLHLISLDVGCPRGGAWFILWRAPPRFFFFFFFFFFF

SEQ ID NO: 283471 - protein, 53 aa, Glycine max
  Clone ID: PAT_MRT3847_97998C.1.pep
VHVSYCNIAGSTSQNPLMLNCRDSCEYIIMNASGSPIHHYASFFPLTSLQSPL

SEQ ID NO: 283472 - protein, 59 aa, Glycine max
  unsure (1)..(59): unsure at all Xaa locations
  Clone ID: PAT_MRT3847_97999C.1.pep
GGGSLFFKGGXKGGELGFILCQLMHKPIGKHKTGFFNRKKKKIKTNGCAFHGGHNCFGL

SEQ ID NO: 283473 - protein, 145 aa, Glycine max
  Clone ID: PAT_MRT3847_9799C.1.pep
LEPLEPGFPTRMFHQKFARRYGFLLLDHVASQDPLSVSVAILHQFNILPEMYQVGYTKLFFRTGQIGVLEDTRNRTLHGILRVQSCFRGYQARHSLKDLRGGITTLQSFIRGDKTRKAYSALLKRHKSCCYYTESASKQYLQETE

SEQ ID NO: 283474 - protein, 80 aa, Glycine max
  Clone ID: PAT_MRT3847_979C.1.pep
GNLARVVFVRHGVLSRTAECSAFCFRFRHCMFLDVCGQHSVCCPLRRSVVRLGLGVHGCRRGIGPAGAVWRDSGKFQVSI

SEQ ID NO: 283475 - protein, 44 aa, Glycine max
  Clone ID: PAT_MRT3847_97C.1.pep
TKRSYTYTHEFMRESSSHLSAISPIALSPYCPIHSRRSFILYIP

SEQ ID NO: 283476 - protein, 112 aa, Glycine max
  unsure (1)..(112): unsure at all Xaa locations
  Clone ID: PAT_MRT3847_98000C.1.pep
TTLYRDWGQTGPKCPGRPGRPTRTIFPYFDAICPKRAKDPVRVLVTGAAGQIGYALVPMVXEEYKQGPDQPVSLHMLDIPPAAESLNDAKMELEDAAFPLLKGVGATTDAVE

SEQ ID NO: 283477 - protein, 53 aa, Glycine max
  Clone ID: PAT_MRT3847_98001C.1.pep
SSYIYAFTHYHEIIFSCLHNSKFSLHISKYQSLPFSLEGILICKYKKKRMSVS

SEQ ID NO: 283478 - protein, 77 aa, Glycine max
  unsure (1)..(77): unsure at all Xaa locations
  Clone ID: PAT_MRT3847_98002C.1.pep
STWNRTILLSIKNSHHPGLGHSHGGYGKIILHPNNFLFMLKQEVSTEKKYTXXCCLQCLTYPISSPKNTIFPNSFKL

SEQ ID NO: 283479 - protein, 78 aa, Glycine max
  Clone ID: PAT_MRT3847_98003C.1.pep
CSTQRKDVHGVSRHDATKKKIPSHTLYLRCTFPLFTFFYSVGASVSVSVPSSFFSASASAITSSSFFTGDPSVVSHAS

SEQ ID NO: 283480 - protein, 58 aa, Glycine max
  unsure (1)..(58): unsure at all Xaa locations
  Clone ID: PAT_MRT3847_98004C.1.pep
SPNVKTISLKSLISPPLIXSFGEKRKICFTRKVFPPLGIFKNAHFFFFPNGNQSVVIF

SEQ ID NO: 283481 - protein, 241 aa, Glycine max
  Clone ID: PAT_MRT3847_98005C.1.pep
MEKDIIHLSPTWDGDNGNSTEKRLRLFGFELNPSKDGYAKESGEGDESVNSSNSVSSGGDKTVQEKPSAKDSDERKFECQYCYKEFANSQALGGHQNAHKKERMKKKRLQLQSINRYLQHPFQSKHGFAHPSDTPWFYDPSTYNNSEFTLSEEPQISFNSNVLDANFSCDQKSSWYSLASHPSNSQQDTCMFTFSNASNNSPFIFKPCHFPASNQSHKSKALDLQLGLNLQSNTRSSLRRM

SEQ ID NO: 283482 - protein, 36 aa, Glycine max
  Clone ID: PAT_MRT3847_98006C.1.pep
IEGFSGFSLVLIGSTLPSFVEHRSQKFIDYHKILEA

SEQ ID NO: 283483 - protein, 52 aa, Glycine max
  Clone ID: PAT_MRT3847_98007C.1.pep
REYNQSSNTDYALPDLSPQILSKFNCPLHHFPPSPNSLFLSSPILAIFFSLA

SEQ ID NO: 283484 - protein, 123 aa, Glycine max
  unsure (1)..(123): unsure at all Xaa locations
  Clone ID: PAT_MRT3847_98008C.1.pep
VPLIKSHQAAYMFKKPRGILQHQCGPCHQELRGVARNXAAPNDLCTEDDIXXILINVRKRRESPFGIQRPNFXEDRIRKSRLLKEPVNPRNSXADSLKNLIAHGSNRTKNKRAKRWPSLSFIF

SEQ ID NO: 283485 - protein, 63 aa, Glycine max
  Clone ID: PAT_MRT3847_98009C.1.pep
SFFSSHTISWVSTFLVWGIKLTSCSTHVCTCQGVKLIMYTGHSVGKLLVSNFYIPKELSNNQL

SEQ ID NO: 283486 - protein, 63 aa, Glycine max
  unsure (1)..(63): unsure at all Xaa locations
  Clone ID: PAT_MRT3847_9800C.1.pep
CYXXXVXLXXHXXSYXLXSSSYNWCYSPGXGYSNSXQXLPLRQAXGEMLXLXXXAXILTSLSQ

SEQ ID NO: 283487 - protein, 86 aa, Glycine max
  Clone ID: PAT_MRT3847_98010C.1.pep
CEHCIRMNDIGYVCTNVACNYNIKLTKKKLRTPLPRGSSLCEDMGEGCCTQPYPCICKEAVSGFEPMTNKSPRHNFTAAPGLALKF

SEQ ID NO: 283488 - protein, 96 aa, Glycine max
  Clone ID: PAT_MRT3847_98011C.1.pep
IRDVVQFSSATPVHIHILNHLTQEIDIIKCITVIAYEDLRAAYIKTTIQMLSSFQSPTQLKSEQQSQKSVKFIYPDRVNISNIQFTREKIKLRCFL

SEQ ID NO: 283489 - protein, 60 aa, Glycine max
  Clone ID: PAT_MRT3847_98012C.1.pep
NISRVSELITICFPPIYFFFSGSLIIFVIFFLFFFVLFFVSLFYFFGRFFFVLCYFIPSQ

SEQ ID NO: 283490 - protein, 68 aa, Glycine max
  Clone ID: PAT_MRT3847_98013C.1.pep
MLAGAPCKIALFTVLHSGEDAWTDRGPRPDFISIRVISTELHNVNPDSVKDLEDGISAISIMIANASL

SEQ ID NO: 283491 - protein, 66 aa, Glycine max
  Clone ID: PAT_MRT3847_98014C.1.pep
DKVVINFIRLRFQKQFIALSSTGCKVFILVTGWLFGSVAKKIKQGLDHFHLMYVLKQSQNHAKSGN

SEQ ID NO: 283492 - protein, 94 aa, Glycine max
  Clone ID: PAT_MRT3847_98015C.1.pep
CPHTQGMVGPPFWDVSQFAFTFKGPHLRGSCRRGCVAVLKISFLHLQGSAMALFPIQREGDHGGMGSDSHSWAWKTWGAPSQHSFCWLYKNLDA

SEQ ID NO: 283493 - protein, 65 aa, Glycine max
  Clone ID: PAT_MRT3847_98016C.1.pep
LWFPPKVFRFLQLVLQKDFILRPNLTSLSWICEWILLYEYIDVVGVFKILESVFFSHCVDTHAHT

SEQ ID NO: 283494 - protein, 86 aa, Glycine max
  Clone ID: PAT_MRT3847_98017C.1.pep
LWDFTFTARMSSSLAEKSTFSRTCTLLRQYLKEKGSFGDLTLGIALPCTNGSPDTSCHSATTMQSVYSRHLEIPTFINPRSTEKEA

SEQ ID NO: 283495 - protein, 72 aa, Glycine max
  unsure (1)..(72): unsure at all Xaa locations
  Clone ID: PAT_MRT3847_98018C.1.pep
LQQNQRIQKEHNAPDDFPDFAREGXQGKEVSSDNYVKSDSSLIYLNYVDGQGDHPNDGQDVTFHYIDYNESG

SEQ ID NO: 283496 - protein, 68 aa, Glycine max
  unsure (1)..(68): unsure at all Xaa locations
  Clone ID: PAT_MRT3847_98019C.1.pep
VHRLTFRKRHSFATKFNPPRVVKTPGGKLVYXTTKKRASGPICLVSGKRIHGIPPLRPTLFLKIKVPH

SEQ ID NO: 283497 - protein, 70 aa, Glycine max
  Clone ID: PAT_MRT3847_9801C.1.pep
LKGSTKSLSNSLNHDHTWNIASSISLVPLNDSFRKTIRFQCCQIKQVRATHQHFHLDCSFPPFKLKDCCM

SEQ ID NO: 283498 - protein, 48 aa, Glycine max
  unsure (1)..(48): unsure at all Xaa locations
  Clone ID: PAT_MRT3847_98020C.1.pep
LGLHTCKETIVAYEIEYRCALEEGAWPVVSAIXAISSLPKFNKWMYFI

SEQ ID NO: 283499 - protein, 75 aa, Glycine max
  Clone ID: PAT_MRT3847_98021C.1.pep
RRRKMKMFGMCGGSDDDNHRDDEDKSPIGAREDGSQYSLTGVLLPSLGATAIRNGSGRPKFRQYIVSPYNRHYKL

SEQ ID NO: 283500 - protein, 69 aa, Glycine max
  Clone ID: PAT_MRT3847_98022C.1.pep
GSGMFWWCRSCRSFWFSFLLRHHCPPRRPPRGGWPIERVGASCGSTWSRECGCRYRRLVHNLVLGWSWF

SEQ ID NO: 283501 - protein, 270 aa, Glycine max
  Clone ID: PAT_MRT3847_98023C.1.pep
MEIGHLIVLALLCVTLKGADASQSAKDYWHSVFPNTRLPKPLWDLVLPSPKTNMPIKVEEEKQYWTLFFEHDLHPRKIMHLGLHKHNDTKNSTISSWARTTSQPFGAWLHAKVEERYNLDEVCGKAAAKGEEKFCATSLQSMMGFAISKLGKNIKAISSSFAQDHDQYVVEEVNKIGEKAVMCHRLNFENVVFYCHQINATTTYMVPLVASDGTKAKALTICHHDTRGMDPIVVYEVLKVKTGTVPVCHFVGNKAIAWVPNLVTSESCVV

SEQ ID NO: 283502 - protein, 62 aa, Glycine max
  Clone ID: PAT_MRT3847_98024C.1.pep
YCPKKRLPQASQRWLYSPITPCKFASNFYLMEESSVFHKNFVLGFAERKKFFVCFLGFKAFF

SEQ ID NO: 283503 - protein, 148 aa, Glycine max
  Clone ID: PAT_MRT3847_98025C.1.pep
MASKRILKELKDLQKDPPTSCSAGPVAEDMFHWQATIMGPADSPYAGGVFLVTIHFPPDYPFKPPKVAFRTKVFHPNINSNGSICLDILKEQWSPALTISKVLLSICSLLTDPNPDDPLVPEIAHMYKTDRAKYEATARSWTQKYAMG

SEQ ID NO: 283504 - protein, 102 aa, Glycine max
  Clone ID: PAT_MRT3847_98026C.1.pep
MASKRILKELKDLQKDPPTSCSAGPVADDMFHWQATIMGPADSPYAGRVFLVTIHFPPDYSYQPPKAAFKTNVLHPGITSTGSIRLDILNELSSTALSFSKV

SEQ ID NO: 283505 - protein, 74 aa, Glycine max
  Clone ID: PAT_MRT3847_98027C.1.pep
LKASNLVQIRKGLPYNKVLTVCVTHNHMDIDCEMTFQNSHISTNPKAKCVYITGVFLISHLASVRVPRRDVFKD

SEQ ID NO: 283506 - protein, 158 aa, Glycine max
  Clone ID: PAT_MRT3847_98028C.1.pep
MASKRILKELKDLQKDPPTSCSAVCANTNVYFVGPVAEDMFHWQATIMGPADSPYAGGVFLVTIHFPPDYPFKPPKVAFRTKVFHPNINSNGSICLDILKEQWSPALTISKVLLSICSLLTDPNPDDPLVPEIAHMYKTDRAKYEATARSWTQKYAMG

SEQ ID NO: 283507 - protein, 148 aa, Glycine max; identical to SEQ ID NO: 283503
  Clone ID: PAT_MRT3847_98029C.1.pep

SEQ ID NO: 283508 - protein, 58 aa, Glycine max
  Clone ID: PAT_MRT3847_9802C.1.pep
LDTCPIIIQSQNIIEGQTPLDQLKYSTWFNLCLHFLKGFINLILFHAIYNLKLILDGQ

SEQ ID NO: 283509 - protein, 107 aa, Glycine max
  Clone ID: PAT_MRT3847_98030C.1.pep
MSVSVTQTITRNRKSAEKISEGQFLSMEVDELQELEEKAKKTQFKTQIVWRNVILYLILQTGALIGVYQLFTSSKWLTVFWCLFLWMVSGVGITAGPHRLWSHISYK

SEQ ID NO: 283510 - protein, 102 aa, Glycine max
  unsure (1)..(102): unsure at all Xaa locations
  Clone ID: PAT_MRT3847_98031C.1.pep
MEVPRKYSAKRALTVVLTCIMAATVGXLFNYYHGESSTVTCINNFQNKNMISVYENXDYPEDPYXNQDCKFNNQILTLSTSFLNLRSLLAKLLASTMTILHS

SEQ ID NO: 283511 - protein, 60 aa, Glycine max
  Clone ID: PAT_MRT3847_98032C.1.pep
FLSLYNGNQCKLNFVQTSIHLNNKFYTLKGLWCIFSNNFPITEGQKERESLVVKDLVRLH

SEQ ID NO: 283512 - protein, 87 aa, Glycine max
  Clone ID: PAT_MRT3847_98033C.1.pep
HRPKKKKKNKKKKKKKKKKKKKKKKKKKKKKKNNKKKEKKLKKKKNIKKKEKKRGGGLFKGPIFPLGAWRFLLFFLGPLNVNPGPRF

SEQ ID NO: 283513 - protein, 133 aa, Glycine max
  Clone ID: PAT_MRT3847_98034C.1.pep
VPNRSKTISCQIIKFKESRANSETVSLLLPHRLDSGDDLSLLAIKLDHHVLVSISLPITQELRMTNEATTAVSYLVPVNSEDCAFLHGFFHPRQNLISESRYTIVLVGVIFFAGATACHDSEHNVVDLLLLLG

SEQ ID NO: 283514 - protein, 81 aa, Glycine max
  unsure (1)..(81): unsure at all Xaa locations
  Clone ID: PAT_MRT3847_98035C.1.pep
XIKYXXXIXTYAXXLXLLFXXLFRXFGLLFLXWKKKXXSTATTPFRAXFEVTTXHXXAWWTKEXXXLQIXXYSRGFQKCXC

SEQ ID NO: 283515 - protein, 208 aa, Glycine max
  unsure (1)..(208): unsure at all Xaa locations
  Clone ID: PAT_MRT3847_98036C.1.pep
MAFSIFKHVLSLFLLCIFLQEPTNALRKTYIVYMGGHSHGPDPLPSDLETATNSHHDLLASYLGSHEKAKEAIIYSYNKYINGFAALLEEEEASQIAKNPNVVSIFLSKERKLFTTRSWDFLGLEKNGKVTANSAWRKARYGENIIIANIDTGVWPEHPSFSDKGYGPIPSSGVEKGVCQIDSFNGTKXILCNRKLIGARIFLKGRGG

SEQ ID NO: 283516 - protein, 318 aa, Glycine max
  Clone ID: PAT_MRT3847_98037C.1.pep
MASNTELLLQRYPFSSSFRFLPLTTTTTLSFSLLRPRSLPFPLKFHASFSFKSPTSTLRAFSDAEEDEEDDEEDDEEEDQDHDQDNVSADEYDDVLGEASDDEADVFSPHDGFKWQRVDKLCNEVREFGADLIDVDELASVYDFRIDKFQRQAILAFLRGFSVVVSAPTSSGKTLIAEAAAVATVARGRRIFYTTPLKALSNQKFREFRETFGGSNVGLLTGDSAVNKDAQVLIMTTEILRNMLYQSVGNVSSGSGLVNVDVIVLDEVHYLSDISHGTVWEEIVIYCPKEVKLICLSATVANPDELAGWIGHILILCW

SEQ ID NO: 283517 - protein, 154 aa, Glycine max
  Clone ID: PAT_MRT3847_98038C.1.pep
DSTYRMLKIACNFGSSQHPSVQCMQALRVATVEQGNIDPYSVYTQPCNNTASLRRGLKGRYPWMSRAYDPCTERYSDLYFNRPEVQKALHANVTGIPYAWKACSDIVGNYWTDSPLSMLPIYQELISAGLRIWVYSGDTDAVVPVTATRYSIDA

SEQ ID NO: 283518 - protein, 93 aa, Glycine max
  Clone ID: PAT_MRT3847_98039C.1.pep
GSHSCGQNFVSAGWNMHTGVPPILSFRVQGVRVRSVEPSPEVAPRLQTPNSITQGYQVYDTEEKVVMFRKEARVPPAGKVRSVCRVTGLDAML

SEQ ID NO: 283519 - protein, 473 aa, Glycine max
  Clone ID: PAT_MRT3847_9803C.1.pep
MQIIGSFQKLWNIAGVHLNLDIPKWMHILRLDRLNTNAVQWLNKKGKLFEPTYLYTMEKGYFLLPESAKSHHNIRTVNVSISAWHSCFGNRWQQLLINRFVGYDTILINSLLSSPGQGYLYNYQTKEFYNLSYAQEVPEGPARFGDYLVTKCGVLMMSLFVFFTTTMSVSFTLRETQTRMLKFTVQLQHHARHRLPTFQLIFVHVIESLVFVPIMIGILFFLFEFYDDQLLAFMVLILVWLCELFTLISVRTPISMKFFPRFFLLYFLVFHIYFFSYAYGFSYLALSTTAAFMQHLILYFWNRFEVPALQRYMQNRRSQLQQHPDFHITSSTILASTLHITRLNTRNQGLNNVDLATGAGLRPGFDQSMPQNGPGVADPQDRSENNRDRVANPAQIPGQADIQQAERGPNPGSMNSFSSLLLWILGGASSEGLNSFFSMFRDVREQGQVFNETPGAGAGAGDESRENQDNIDR

SEQ ID NO: 283520 - protein, 50 aa, Glycine max
  Clone ID: PAT_MRT3847_98040C.1.pep
LNCVDTNTANPNARPPQLRERTSTRRVISLLCRVEHAPTRLAGFLFFYLI

SEQ ID NO: 283521 - protein, 91 aa, Glycine max
  unsure (1)..(91): unsure at all Xaa locations
  Clone ID: PAT_MRT3847_98041C.1.pep
AVLKVGYRLTYLAEVTDARMELSLLKREQSSSNHEDEYAQTCCDLCMRTRSMPAECMXENMRQNSCHSHRESRVCTRSQPGQWLRIDTNHI

SEQ ID NO: 283522 - protein, 37 aa, Glycine max
  Clone ID: PAT_MRT3847_98042C.1.pep
QNKGFSFSFVPLLNNKLSTFYQPSTKILRVTKGEISN

SEQ ID NO: 283523 - protein, 85 aa, Glycine max
  Clone ID: PAT_MRT3847_98043C.1.pep
MLPQRMKKAITDNPKKLANLIDLVNLPSTLREFVGQSQISRLGCFKCIWSYIKTNNLQDQNNKNVVNCDEKLKSILLGKPQVELA

SEQ ID NO: 283524 - protein, 133 aa, Glycine max
  unsure (1)..(133): unsure at all Xaa locations
  Clone ID: PAT_MRT3847_98044C.1.pep
DFACGQGRTCCNVQTLLCRATLSDWDSXTDARFFEPDQITADLSGHTKTRASXNVPSMSVLSCTRLCRGPTYPXDLCSCYRNGGQTLVMTETQEXGSQIARILTGGIASDGDIHESTREASLVGYRSGKVMTL

SEQ ID NO: 283525 - protein, 64 aa, Glycine max
  Clone ID: PAT_MRT3847_98045C.1.pep
MIKKKKKKKKKKKKKKKKKKKKKKKKKKKKKKKKKKKKKKKKKGGPLLKNQSLLPRPSNEKFFL

SEQ ID NO: 283526 - protein, 39 aa, Glycine max
  Clone ID: PAT_MRT3847_98046C.1.pep
GRYNTQPHKTLQTAVRHDASLLTRASDVSALLYCHLGSI

SEQ ID NO: 283527 - protein, 71 aa, Glycine max
  Clone ID: PAT_MRT3847_98047C.1.pep
GPQRVRRIVRSTTATKEEAALQLEPMPHRVTKRKRENIQMVKILVPLSNYNNFMDLTEEILATEINIIKSK

SEQ ID NO: 283528 - protein, 91 aa, Glycine max
  unsure (1)..(91): unsure at all Xaa locations
  Clone ID: PAT_MRT3847_98048C.1.pep
SSSFTSIHITALDAIVNVNSLXFTLAVFIGLTWNPNDPSNRLNTDPASSTAPPSAPACSYPSPVVASSCSPSSTSRRSSSKPSSAEAHTLT

SEQ ID NO: 283529 - protein, 59 aa, Glycine max
  Clone ID: PAT_MRT3847_98049C.1.pep
QESVHLIVISPTPQAISDRAHKGSSTGRIENKLTNMLSHDEEVAIKSRVYEHKTVWLNH

SEQ ID NO: 283530 - protein, 148 aa, Glycine max
  Clone ID: PAT_MRT3847_9804C.1.pep
HPDFHITSSTILASTLHITRLNTRNQGLNNTDLPTGAGLRPGFDQSMPQNGPGVADPQGRSENNRDRVANPAQIPGQADIRQAERGLNPGSMNSFSSLLLWILGGASSEGLNSFFSMFRDVREQGQVFNETPGAANENPENQDNIDNR

SEQ ID NO: 283531 - protein, 69 aa, Glycine max
  unsure (1)..(69): unsure at all Xaa locations
  Clone ID: PAT_MRT3847_98050C.1.pep
SNLTQFSFSNTNINSLFNTYIKQTMLQQQHXFSFNVFFFFKSPSPHFPSPFKKPIIIFFLNKIITLTFY

SEQ ID NO: 283532 - protein, 38 aa, Glycine max
  Clone ID: PAT_MRT3847_98051C.1.pep
EKLNASRYVVLFLEGQNLEQESLQVMRRLINLCTTNNT

SEQ ID NO: 283533 - protein, 94 aa, Glycine max
  Clone ID: PAT_MRT3847_98052C.1.pep
MEGGHMGWLLFCCCFSLLFFHSSGSPRRNLPIIAFEDGYTPLFGDHNLAIHRDGKSVHLSLDERSGSGFAPHDLYLHGYFSALTKLAADYPAGV

SEQ ID NO: 283534 - protein, 77 aa, Glycine max
  Clone ID: PAT_MRT3847_98053C.1.pep
NVTTVPVFMLRLTIQVTIFSEWTEDDADRLVYIQALTSDTVLAVPMAETYRLLGVDDKDVVPPHTYLVELWSHIVQK

SEQ ID NO: 283535 - protein, 70 aa, Glycine max
  Clone ID: PAT_MRT3847_98054C.1.pep
FPWSPPSLRSHLNHAILLYRFTLTKSLFVSSIQFSLIWLSKSNQIDYQTHSHSFPSFVTEIGLLLSHICI

SEQ ID NO: 283536 - protein, 56 aa, Glycine max
  Clone ID: PAT_MRT3847_98055C.1.pep
VFILLRRPFEPLLSPPRMEECKCYLNIILESLRSFRMSYSISVRKFNYCRYHPHVT

SEQ ID NO: 283537 - protein, 40 aa, Glycine max
  unsure (1)..(40): unsure at all Xaa locations
  Clone ID: PAT_MRT3847_98056C.1.pep
SFFLDXNFFLGSTDSCFISTNSSPFDCIPSLYFYLIIQRY

SEQ ID NO: 283538 - protein, 48 aa, Glycine max
  Clone ID: PAT_MRT3847_98057C.1.pep
SVHHVVLDKWTPLIGFFTQSKSLQSLFLLKMFLFETLCCHNNQCYALK

SEQ ID NO: 283539 - protein, 78 aa, Glycine max
  unsure (1)..(78): unsure at all Xaa locations
  Clone ID: PAT_MRT3847_98058C.1.pep
FKIYGMQRALKTMKCPMNYHNNPFNTAAFPTXTAFHFTMPTAAWPTAPTTSAXTQSKTPSACIAYESTITSDIPSTQV

SEQ ID NO: 283540 - protein, 34 aa, Glycine max
  Clone ID: PAT_MRT3847_98059C.1.pep
VTLFPSFWLSQPLFLVHGCNPAEAPSEIGMQPSG

SEQ ID NO: 283541 - protein, 42 aa, Glycine max
  Clone ID: PAT_MRT3847_9805C.1.pep
FITLGLLSLKRPEGLRFYHHIIFYTNKFFLNSVFFLFSPFII

SEQ ID NO: 283542 - protein, 140 aa, Glycine max
  unsure (1)..(140): unsure at all Xaa locations
  Clone ID: PAT_MRT3847_98060C.1.pep
WGITLLFPRKEYSPCSSPPSPSPPPATQPFPTPAPPLPTSMPIQPDLAPPLPPHQIDQNVNSASTLPSPPPPIVSNAPSQPPPPPPPPPLPPRSVQTGSAPPPPGPVRTGSVPPPPPPPGSVQTGSAPPPPPXPGPVRTG

SEQ ID NO: 283543 - protein, 52 aa, Glycine max
  Clone ID: PAT_MRT3847_98061C.1.pep
YNLPPHSIPILTVLTHHHTHVHTTTQNYLFTYFILYTLSKLNLSNQNTTNCK

SEQ ID NO: 283544 - protein, 88 aa, Glycine max
  Clone ID: PAT_MRT3847_98062C.1.pep
IALIVSRTIFQSDMRQILSLVSVPCHIIQAEKDMAVPMMISEYLHQHIGAESIVEVMATDGHLPQLSSPDTVIPVLLKHIQLDIEARR

SEQ ID NO: 283545 - protein, 158 aa, Glycine max
  unsure (1)..(158): unsure at all Xaa locations
  Clone ID: PAT_MRT3847_98063C.1.pep
LVHPFDFVNRSQSAHDTYPAVMHIASXRHIHSVLILGLKTLHDSLLFQXLESKDNAMIGHTHTQDATALTVGHETSEYTTQTIDRIDRVIDTLPRMYHVRPSDTAARTVLNTQRGSDAKTASTTTKETDLPFATAENKDEALAAHDAYDETSGSLNTD

SEQ ID NO: 283546 - protein, 67 aa, Glycine max
  Clone ID: PAT_MRT3847_98064C.1.pep
WLNSSEMNSIGRNWHVIYSGKLYFHCYNTFHLVACYVIIIYQMICLKTPNQLWFRVTARLIQFFLEP

SEQ ID NO: 283547 - protein, 87 aa, Glycine max
  Clone ID: PAT_MRT3847_98065C.1.pep
AFCDKFRTHRIEGTDGEPHIHAPEFPKPSNTPPNQALPPPIPSQTPNPMIHTRHTSKQQARRRSGNTKVIKTRDGRVKSPPTLAGAL

SEQ ID NO: 283548 - protein, 135 aa, Glycine max
  Clone ID: PAT_MRT3847_98066C.1.pep
MSFDHLNELPINTSPDAKNEVEEHQDIDIHDLFGSETPEDDHNVEEKDNVGFDMNVPHTDDEIADVDDSGDEVDKGPNAAEALGDQVNAEGRDEQTSTSSSSSGSSSSESGSGSGSGSSSNSDSEGSDEDSVHSI

SEQ ID NO: 283549 - protein, 82 aa, Glycine max
  unsure (1)..(82): unsure at all Xaa locations
  Clone ID: PAT_MRT3847_98067C.1.pep
MIHAKSPPQAHCYHCHHXHCHHHHCHYRHHHXHYYXXNHHHHLHQHHXYHSQHHHQHWHCHHWLRCCCCCCYHQHYHKILLY

SEQ ID NO: 283550 - protein, 127 aa, Glycine max
  Clone ID: PAT_MRT3847_98068C.1.pep
MANKSQEEPKTAPEPDRWYNLTLGPSFKDDSSNKYCTLRYEFKPASVDKTKPGLLRKTKENRVSVEFQNNQIGKPKVTFEGNSEEYKENDAVLFFDGETLRLERLHRAVKQLRHLRMPGESAGAAST

SEQ ID NO: 283551 - protein, 318 aa, Glycine max
  Clone ID: PAT_MRT3847_98069C.1.pep
MANKSQEEPKTAPEPDRWYNLTLGPSFKDDSSNKYCTLRYEFKPASVDKTKPGLLRKTKENRVSVEFQNNQIGKPKVTFEGNSEEYKENDAVLFFDGETLRLERLHRAVKQLRHLRMPGESAGAASTVVAAPSGPALDPRSSPVGKSVKPAPLGRSSFPAVPVEVERIDIGEPENTGIKSGSKRSFDHLNELPINTSPDAKNEVEEHQDIDIHDLFGSETPEDDHNVEEKDNVGFDMNVPHTDDEIADVDDSGDEVDKGPNAAEALEDQVNALGRDEQTSTSSSSSGSSSSESGSESGSGSSSNSDSEGSDEDSVHSI

SEQ ID NO: 283552 - protein, 71 aa, Glycine max
  Clone ID: PAT_MRT3847_9806C.1.pep
MVWYLKSVALIKGSSGQSSLEFFIMVQVKMKFLPSDSIFLDRFFVSSTMPLFLSIIGVCLVQSRRYHYVEF

SEQ ID NO: 283553 - protein, 271 aa, Glycine max
  unsure (1)..(271): unsure at all Xaa locations
  Clone ID: PAT_MRT3847_98070C.1.pep
MSLLLLPQPPTPLSTVTFSAAARAPFAAVTPPRPRTLTPKPALSLSAPITTTAPNNAIPPKKVLVPIGLGTEEMEAVIMIHVLRRAGADVTVASVEPQLQVEAAGGTKLVADTDISACSDQVFDLVALPWQGGMPGSARLRDCDVLRKITCRQAEENRLYGAICAAPAVTLLPWGLLKKKKITCHPAFYDRLPRFWAVKSNLQVSRGLTTSRGPGTTYQXALSLAEQLFGDSVANEVAESMFMRTDDDHAAKEFNKVEWSVGHHTPSVLVP

SEQ ID NO: 283554 - protein, 651 aa, Glycine max
  unsure (1)..(651): unsure at all Xaa locations
  Clone ID: PAT_MRT3847_98071C.1.pep
IVVIIGAVTAHLLFPGVFAAEELSLEEKLAEMHETRHAFGRTALLLSGGASLGASHVGVVKTMVEHKLMPRIIAGSSVGSIMCAVVATRTWPELQSFFEDSWHSLHFFDQMGGIFARGKRVTTLGAVHEIRQLQMMLRHLTSNLTFQEAYDMTGRILGITVCSPRKHEPPRCLNYLTSPHVVIWSAVTASCAFPGLFEAQELMAKDRNGEIIPYHPPFNLGPEEGSTPARRXRDGRLMIDLPMMQPAELFTLLHFIPNCINPHIAPLLRLAKLGRPTVAYMMEVTVHLKELICILGQELILLXEFXLQQICSLIFYKTEGDVTVVIPATLAQYTKIIQNPSYGELQKATNQGRRCTWEKLSAIKANCGIELALDECVVILNHMRRLKRIAERAASASQGLSSTVRFSASKRIPSWNCIARENSTGSLEDLTDVAASKHQGISSSCGTNGKTWKTYRGILDGSDSDSESVDLXSWTRSGGPLMRTTSANMFVDFLQNLDVDTDQNNKGLVSRANPNDFQYRSPRLATLDRNSDSTESEPREIGNRVFNVSSILVTEGDLLQPERIHNGIVFNVVKKEDLSPLSGSSHDFENYNIEVAECVQDECPGKEIDAASSASEHGDDEESTVARSLTETQDYNSMDHHSGMDQSIVDS

SEQ ID NO: 283555 - protein, 49 aa, Glycine max
  Clone ID: PAT_MRT3847_98072C.1.pep
RSNVHNGVVHRLSAIDHKARSLHHRSRYGHFRASLSLSLGRDADDKLQP

SEQ ID NO: 283556 - protein, 75 aa, Glycine max
  unsure (1)..(75): unsure at all Xaa locations
  Clone ID: PAT_MRT3847_98073C.1.pep
YALRQSTSNIKISSKNFQXKKSVPPTFSAKRIFINTLLTKCSNYIICGRGPGLIHIQLSNSISITKTFTPLTVNN

SEQ ID NO: 283557 - protein, 45 aa, Glycine max
  Clone ID: PAT_MRT3847_98074C.1.pep
NIFLLQNYVPLVQASKVSHPLQHTKVIVSPYPKGCFPSHFWPFGP

SEQ ID NO: 283558 - protein, 36 aa, Glycine max
  Clone ID: PAT_MRT3847_98075C.1.pep
AYASRNYTSRFHCTTCTYFAVCNTRWTALWAPCHLP

SEQ ID NO: 283559 - protein, 66 aa, Glycine max
  Clone ID: PAT_MRT3847_98076C.1.pep
TKKNKLIIPEMPVEGSNRGIVHGEVEEAEAAGLGANHANLIVGWSDDVLDGKLLHLLPWISIYIFN

SEQ ID NO: 283560 - protein, 94 aa, Glycine max
  unsure (1)..(94): unsure at all Xaa locations
  Clone ID: PAT_MRT3847_98077C.1.pep
ITSEPKSFKAXLSHSYQSHEGVLLRQIRSWSNPHYPAVIDPCMSIFITKYSAPAFIWSTCSSTVIWSVVRQAPQCRRAPASPSVAPGVRLPGLN

SEQ ID NO: 283561 - protein, 54 aa, Glycine max
  Clone ID: PAT_MRT3847_98078C.1.pep
KGGANVLIPCVVCGAFSYGSGLWVRQYVVFCVVFVVFTNVVGRGNDEGGRLTWG

SEQ ID NO: 283562 - protein, 47 aa, Glycine max
  unsure (1)..(47): unsure at all Xaa locations
  Clone ID: PAT_MRT3847_98079C.1.pep
FNQLSGPGNWPKVSAIQPMPILSFWEQHEVHMVVIVSVNLQYXTHFR

SEQ ID NO: 283563 - protein, 54 aa, Glycine max
  Clone ID: PAT_MRT3847_9807C.1.pep
WALRKTRVSSYSNSLSHSHCAIFSAPKTHTFKLVCLLSPAPKPLPLFLTHIIWL

SEQ ID NO: 283564 - protein, 62 aa, Glycine max
  unsure (1)..(62): unsure at all Xaa locations
  Clone ID: PAT_MRT3847_98080C.1.pep
LSTWIVTIRNFYHNIFLTFRXPTRLTNTSLIFSMQLGFAMLSVVINFARSDIVHMVSVGAGV

SEQ ID NO: 283565 - protein, 83 aa, Glycine max
  Clone ID: PAT_MRT3847_98081C.1.pep
SYRNAFRTVIVFFRYNSKMLLISNIPTRQTTILLQVSLHDPPPYVSRSVTSHQNVFPRIKSCYVSERCIVDSAFCVSTSSKFK

SEQ ID NO: 283566 - protein, 53 aa, Glycine max
  Clone ID: PAT_MRT3847_98082C.1.pep
PGSLIPLHRVKPCWEPGVPPGLVNGFSFGCVSVHLLVPFSEFSLPLNINKPLQ

SEQ ID NO: 283567 - protein, 49 aa, Glycine max
  Clone ID: PAT_MRT3847_98083C.1.pep
SYSFFGWFSHFTTGGGKMNFHFRRVISGTPPTKGVKTGGFPQICLFRAL

SEQ ID NO: 283568 - protein, 44 aa, Glycine max
  Clone ID: PAT_MRT3847_98084C.1.pep
NIIFSLLIFYINIICYISGHIILKIYSVLKIVHVALNSCLCVTN

SEQ ID NO: 283569 - protein, 46 aa, Glycine max
  Clone ID: PAT_MRT3847_98085C.1.pep
LFFFFLGFFFVFFFFFFRRGKKYPGPYFSRFHSKTKSLSPSIWILI

SEQ ID NO: 283570 - protein, 98 aa, Glycine max
  unsure (1)..(98): unsure at all Xaa locations
  Clone ID: PAT_MRT3847_98086C.1.pep
KTFLWGGTSMXMSVAINKAWVLTDQAXPKDLVRGGVAVKDPSVPNGVRFWIEAYPNAFVGLEXWVAIKLWWQEYFXIFLQXDWDLQKAPELQAXWWKD

SEQ ID NO: 283571 - protein, 36 aa, Glycine max
  Clone ID: PAT_MRT3847_98087C.1.pep
TPPWPQRRLTYLGLPVSVSHSELCPPYAHVKDDIDA

SEQ ID NO: 283572 - protein, 85 aa, Glycine max
  unsure (1)..(85): unsure at all Xaa locations
  Clone ID: PAT_MRT3847_98088C.1.pep
SSYGPHNSSFWPCLNTRARVPTHHCSLSLSSSPPSTTQGGALHXSRPTHGPCPFCPTSITAIPLSPSKAASSRIQVLLIPPLSFQ

SEQ ID NO: 283573 - protein, 41 aa, Glycine max
  Clone ID: PAT_MRT3847_98089C.1.pep
TISISAVRVIRNSPEQVTKSRDTHYSWPHRYQAYPPRDRLE

SEQ ID NO: 283574 - protein, 61 aa, Glycine max
  Clone ID: PAT_MRT3847_9808C.1.pep
IFGKDVVSLAHSGISCIKGFTLAYKGCSKVANGSLFKRCGYDRVTKDQWLLGVGLELRHNY

SEQ ID NO: 283575 - protein, 187 aa, Glycine max
  unsure (1)..(187): unsure at all Xaa locations
  Clone ID: PAT_MRT3847_98090C.1.pep
LELEPLEPNRLECDLASALHAMGXDERAIEVFQKAIDLKPGHVDALYNLGGLYMDLGRFQRASEMYTRVLAVWPNHWRALLNKAVSLLGAGETEEAKRALKEALKMTNRVELHDAISHLKQLQKKKTKPSNGGASGEASFVIVEPSXVKVVGEKTTARQELATALXIRALQRVTRLSRCSVELLRRR

SEQ ID NO: 283576 - protein, 408 aa, Glycine max
  unsure (1)..(408): unsure at all Xaa locations
  Clone ID: PAT_MRT3847_98091C.1.pep
IKLDPSYVRAYNRLATIYVRLGEAEKALDCNQSIPYVDSILAFQAQALQNHLNKCIEARKVNAWSDILKETQFAISLGADSAPQVYALQTEALLKLLRYQEAYVIYDKMPKFSICLVWSRCLAQLAXAYLLVIGSMVYLASGRFEEAVASTQQAAXVDPGNMEVNAIRRKARAATSARMSGNLLFKASKFIEACAAYNEGLEHDPHNSVLLCNRAAXCRSKLGQNEQSXLKICDAALRVRPCWSQPRVGRAICYAVLQRWAAPLQDYEMLLRERPGDEEVARALFEAQLQLKMLRGEDIKDLKFGSNLVSISSNDRFRHYVTSPGMAVALFTNKATHKKVLLVLEQISKRFPSVNFLKVEIEDHPYLAKSESVSSIPAFKIYKNGSSVKEISGNNHELLERSVKLYSS

SEQ ID NO: 283577 - protein, 263 aa, Glycine max
  Clone ID: PAT_MRT3847_98092C.1.pep
FSPRGKTREKEKDEEVEDLSFDGSGLNYDSDDLTESNYNNVSEGNTGKNGGVSSNANSTVITGLDQKGKKKGMPAKNLMAERRRRKKLNDRLYMLRSVVPKISKMDRASILGDAIEYLKELLQRINDLHNELESTPVGSSLTPVSSFHPLTPTPPTLPSRIKEELCPSSLPSPNGQPARVEVRLREGRAVNIHMFCARKPSLLLSTMRALDNLGLDIQQAVISCFNGFAMDIFRAEQCKEGQDVHPEQIKAVLLDSAGYNGMM

SEQ ID NO: 283578 - protein, 78 aa, Glycine max
  Clone ID: PAT_MRT3847_98093C.1.pep
LERWEAAIQDYEMLLRERPGDEEVARALFEAQLQLKMLRGEDIKDLKFGSNLVSISSNDRFRHYVTSPGKTHLAASVV

SEQ ID NO: 283579 - protein, 77 aa, Glycine max
  Clone ID: PAT_MRT3847_98094C.1.pep
SENAMPVATNNPYERGVSDSVSNPCLYKEDDNSISTSLAYNEEVANIITMDGTYDRTDNKFTSSIQSYNKGNDSLSI

SEQ ID NO: 283580 - protein, 110 aa, Glycine max
  Clone ID: PAT_MRT3847_98095C.1.pep
FRYHWCVSPHSLVAAILRRSDPPSTPAHCNYGLSQDPARVTILAVFAQSVPAHRRTEVSPSEVAAAALRVLRGGGGIGRASVRHRGGGHGALVRDEGSGRVGGGGGGGGV

SEQ ID NO: 283581 - protein, 83 aa, Glycine max
  unsure (1)..(83): unsure at all Xaa locations
  Clone ID: PAT_MRT3847_98096C.1.pep
MSYYDAYTTYSTIYYCGYASNIKDTGTWRACPYMLXKRMXERLTYYGMSTYLVLYLMNQINDYTATACNNVCNCNETCYITPL

SEQ ID NO: 283582 - protein, 86 aa, Glycine max
  Clone ID: PAT_MRT3847_98097C.1.pep
IIKKKKLQVAYRFISSLDILYGRYSSFFLHFNFSSVREELKIEYPSHPLESIHSTRQSHLGVFCFQFLKLLLGTDKPPLQLCYLMK

SEQ ID NO: 283583 - protein, 52 aa, Glycine max
  Clone ID: PAT_MRT3847_98098C.1.pep
SSTKTNSNDHQDGHNMSKCFLNKSILHYCLNSKLRQLLNYTGHATRLNSSKI

SEQ ID NO: 283584 - protein, 64 aa, Glycine max
  Clone ID: PAT_MRT3847_98099C.1.pep
RLYHKTYMLSYYKNINKLPGSKIQLENREGKVQSCQLKPNPLKLFSKKDLLRLSFFFLIWTKRG

SEQ ID NO: 283585 - protein, 49 aa, Glycine max
  Clone ID: PAT_MRT3847_9809C.1.pep
QQPTTRDNKKQKKKTKKKKTKNKKHKKQKKKKHKQKKKKKKKQDTQKKM

SEQ ID NO: 283586 - protein, 89 aa, Glycine max
  unsure (1)..(89): unsure at all Xaa locations
  Clone ID: PAT_MRT3847_980C.1.pep
ACCDAXVXCGIXSXFPLTIMCXSXXNEMLIXYSYVXLLRQAKAPSMXXQSFKNFXSXXVYGDXNLISVHEYXKPYFXXSKXKSFLAGHN

SEQ ID NO: 283587 - protein, 78 aa, Glycine max
  unsure (1)..(78): unsure at all Xaa locations
  Clone ID: PAT_MRT3847_98100C.1.pep
SRSPSRSRSSSPSSSSPSRSSRSRSXXPQRRRSPXDAARRGXSPPHQSKXAXLPPRXTSPVSEXTXXSCXKXSSXNVQ

SEQ ID NO: 283588 - protein, 38 aa, Glycine max
  Clone ID: PAT_MRT3847_98101C.1.pep
LMGTTAKFFKTFLAVGWLVLDQKGQKPKVLFLHPGMPK

SEQ ID NO: 283589 - protein, 91 aa, Glycine max
  unsure (1)..(91): unsure at all Xaa locations
  Clone ID: PAT_MRT3847_98102C.1.pep
KRRVDTEWFLXGDFDTYTVQMRKPHIWGGEPELLMSSHVLQMPITVLMQDKSSSNLKVIAEYGQEYGKDNPIRVIYHGYGHYDALLKSSFH

SEQ ID NO: 283590 - protein, 36 aa, Glycine max
  Clone ID: PAT_MRT3847_98103C.1.pep
SHQFLCTKWFTKSRVMFRILNSELKYFVSLDSISYQ

SEQ ID NO: 283591 - protein, 69 aa, Glycine max
  Clone ID: PAT_MRT3847_98104C.1.pep
KNIFSLSVFFSFLFISHFFHSNKFITSQNRVILSNKLNNTLISYFPFECCEIETTHAIFISQKMFHQHM

SEQ ID NO: 283592 - protein, 36 aa, Glycine max
  Clone ID: PAT_MRT3847_98105C.1.pep
ISRIRVWYQTSLPIGHSSRCLGSNVYIGLAVRDAWT

SEQ ID NO: 283593 - protein, 42 aa, Glycine max
  Clone ID: PAT_MRT3847_98106C.1.pep
NYNRKNVYIDVKTNFRITPSNSKLIKNIQSTLYAKSFFISII

SEQ ID NO: 283594 - protein, 75 aa, Glycine max
  unsure (1)..(75): unsure at all Xaa locations
  Clone ID: PAT_MRT3847_98107C.1.pep
ATGIXNNNIFXLKKXKPKTXXHXXIXKEINKXXYXXYNFSXXLXXXXKXXLIXSTKMKTFLIXPEXKEKXNPKXX

SEQ ID NO: 283595 - protein, 83 aa, Glycine max
  Clone ID: PAT_MRT3847_98108C.1.pep
RAESARVRQKGFPALITGLCQVYRVPVTPNRVIRPPLTRLSSRSIAPPGRHRARHHSSLRMAGSGQQTHCRHLKSTSAHSQKG

SEQ ID NO: 283596 - protein, 49 aa, Glycine max
  Clone ID: PAT_MRT3847_98109C.1.pep
KESDSFTEWSMFQLCIWRVRDGVVVVINKPCLCNENRSNQCNQAGFNFL

SEQ ID NO: 283597 - protein, 312 aa, Glycine max
  Clone ID: PAT_MRT3847_9810C.1.pep
DAGPWTILGQSYGGFCAVTYLSFAPQGLKQVLITGGIPPIGSGCPADSVYKAGFEQAIHQDGEGGTSIRRDPNRTRGLVNYLAEQEGGGVALPSGGFLTPRGLQTLGLSGLGSRAGFESMHYLFESVWDPTFVPGAPKRISYNFLSSFEKWLNFDTNPLYALLHESIYCQGSANKWSANSVRTAVGDKFDAIRAARERLPVLFTGEMIFPWMFDEIHALKPFKEAAHILAEKKDWPPLYDVQVLNNNKVPVAAAVYYEDLYVNFKLAMETASQIAGIRPWITNEFMHSGLRDDGSKVIDQLLGMLNGRKPLF

SEQ ID NO: 283598 - protein, 48 aa, Glycine max
  Clone ID: PAT_MRT3847_98110C.1.pep
INLTALSLHSSRSYYRCSNPGCPVKKHVERASYDSETVITTYEGQHDH

SEQ ID NO: 283599 - protein, 85 aa, Glycine max
  Clone ID: PAT_MRT3847_98111C.1.pep
LSVSFGLPGAFSQENGTLSLVFWTAPTEYDEHEVSATFGLPRRRVDKRGAFKFNFLGRFLSMVSKTSSTSLFFFCFLGFHIRELQ

SEQ ID NO: 283600 - protein, 58 aa, Glycine max
  Clone ID: PAT_MRT3847_98112C.1.pep
TLCLSFLFIFISSTSVLHPFLFICHTFFISEKSTTLHRALKDHFFFSLYHYVEQGKFK

SEQ ID NO: 283601 - protein, 296 aa, Glycine max
  Clone ID: PAT_MRT3847_98113C.1.pep
LKCGGFIQALRLNHTMSDAAGLVQFLNAWAEMAGGAKSPSIAPVWRRELLMARDPPRITCKHHEYMEFVDTEIEEGSLTLHDDDMVLRSFFFGPSQIASLRRLVPHYCATFDLITACLWRCHTKALKIDADKDVRMMVAVNARAKFNPPLPVGYYGNAIAYPAAVTTAGKLCGNPFGYAVELINKVKGKATQEYMHSVADLLAIKGRYIPRMVRSLTVSDLRGFDPRQIDFGWGHALYAGPAQGGLGPFPGVTFITPFKNAKGEDGLVLPIWLPTEAMNRFSKELDGMFGFICSSL

SEQ ID NO: 283602 - protein, 257 aa, Glycine max
  Clone ID: PAT_MRT3847_98114C.1.pep
MKKMKGVVSLDPPYEVYQDQRARLRHQSLLQDYEDLHKETEAMRRKLQATRQKKLMLEDEVRFLRQRYNYLLKHPILKPHPKQVVKPQKLKLQAPIISKGKNYSRKEPTLRPHPTSHLNSNGRISNVAEAPLKKTGHLFDLNLNARSSSKKDASFNGSGPPVLELNHKERIHSSKEATKKSVTPFFDLNQISREEEELQGNSEAMRIEEPKRSTQRVATDEQHSDIKLSAACRSVGDGSNRAGKRKISWQDQVALRV

SEQ ID NO: 283603 - protein, 149 aa, Glycine max
  Clone ID: PAT_MRT3847_98115C.1.pep
INPKLLQLVEDRGSGRSRGRGGMKDDRRDRYSAGKRGGFNTFRDRENYDRGYSNLLKRDFGAKTQNGVYSAANYTNGSFGSNFVSAGIQTSFRTGNPTGTYQNGYDSTQQYGSNVANMHNGMNQQAYAYPATAAAAPMIGYPMPTGYSQ

SEQ ID NO: 283604 - protein, 116 aa, Glycine max
  Clone ID: PAT_MRT3847_98116C.1.pep
FLSHPMTILRFFCPFFILFFTPIASVQAFTGTYGINYGRIANNIPSPDEVVTLLRAAKIRNVRIYDADHSVLKAFSGTGLEIVVGLPNGQLQDMSSNPDHALNWVKENVQSFLPDT

SEQ ID NO: 283605 - protein, 110 aa, Glycine max
  Clone ID: PAT_MRT3847_98117C.1.pep
MACLRRKKHCVQGQQRVSFSNFDHPRQSNMYLILRFFCPFSILFFTPIASVQAFTGTYGINYGRIANNIPSPDEVVTLLRAEKIRNVRIYDADHSVLKAFNGTGLEIVVG

SEQ ID NO: 283606 - protein, 119 aa, Glycine max
  Clone ID: PAT_MRT3847_98118C.1.pep
KKSRGEEVHNLKFGGEVEDISGLEQFRAAISLPGVSVVLFETASNMQCKQISPFMNTLCSRHPSINFLKVDIQTSPAVAAAENVRVVPTFKIYKNGSQVKEIICPSHDMLEHSIRHYSL

SEQ ID NO: 283607 - protein, 79 aa, Glycine max
  Clone ID: PAT_MRT3847_98119C.1.pep
LYNLWQGQSPSLVSLFVLLYKLRPNLTKFSNHQPLLFVIMVSLLINRLVLTLTGPYTEAPAQAAASNYTRPTKTFVWFG

SEQ ID NO: 283608 - protein, 176 aa, Glycine max
  Clone ID: PAT_MRT3847_9811C.1.pep
MAETRRSTGTVKWFNAHKGFGFITPQDGTDDLFVHFTSIRSDGYRSLSDGQSVEFLLDYGDDGRTMAVDVTSAVRSRLPGGFRGGGGGRGRGGGRYGGGEGRGRGFGRRGGGPECYNCGRIGHLARDCYHGQGGGGGDDGRNRRRGGGGGGGGGCFNCGEEGHFARECPNVGKGNE

SEQ ID NO: 283609 - protein, 124 aa, Glycine max
  unsure (1)..(124): unsure at all Xaa locations
  Clone ID: PAT_MRT3847_98120C.1.pep
TFVRLVSDEEXKLYLLGGVGTDGFSRSIKLWELIKGERVWVEVVGLPEIMCRKFVSVCYHNYEHVYCFWHEGMICVCCYMWPEILYYSVLRRTWDWLPRCPYLPLKFSCGFKWFSFVPKLYASV

SEQ ID NO: 283610 - protein, 72 aa, Glycine max
  unsure (1)..(72): unsure at all Xaa locations
  Clone ID: PAT_MRT3847_98121C.1.pep
LPYTQMIRVNELLIPLIHSLHVCNTAVLMQNPFGFWGDFYFPDRIRKAXSLLLFLPMFSSSRIPSXRTXXCD

SEQ ID NO: 283611 - protein, 80 aa, Glycine max
  Clone ID: PAT_MRT3847_98122C.1.pep
GVEIENKVGVVGVKIIEILKMMNPCCTRWMMIKSLQHLHSIIMHTILCTTFCEWLFSVDYLVSLIYLSFYYGWMKIRKYD

SEQ ID NO: 283612 - protein, 218 aa, Glycine max
  unsure (1)..(218): unsure at all Xaa locations
  Clone ID: PAT_MRT3847_98123C.1.pep
ARVAKDPKNVIYVISGRDRTALNEWFKGVPVGFSCEHGCFFKMYPGAEGKDHWEDVGSELDLSWKATVGSIFDDYTDRVPGSHVEAKEICLTWHYRNADPEFGENQKNELVLHLQSLAGLPIDILLGKKAVEARPQGIHKGSVVKRVMSMLSDADFVLCIGDDVTDEDMFEETVGTREXDSEGKFTITVGKKPTFAGYYFDEQESVLDLLGDLAKASQ

SEQ ID NO: 283613 - protein, 46 aa, Glycine max
  Clone ID: PAT_MRT3847_98124C.1.pep
ARAEIMVCIGLLLSFHIMIPYSVTQYVGSALITFVSAEVLEGIFSH

SEQ ID NO: 283614 - protein, 67 aa, Glycine max
  Clone ID: PAT_MRT3847_98125C.1.pep
EPCRKDSVEHRYIAPMRINLPLRHRLWHYEQLSILKTELSPSTTASYILINNAKFLILSNPPGIVLS

SEQ ID NO: 283615 - protein, 56 aa, Glycine max
  Clone ID: PAT_MRT3847_98126C.1.pep
NIISEQLRFCIHGPSEKLIMKTTNLGRTQLHKPNNLAKVIPTSLCHLKLRVYQCHC

SEQ ID NO: 283616 - protein, 85 aa, Glycine max
  Clone ID: PAT_MRT3847_98127C.1.pep
NGNPKDALKLPPDESLLTQIKDGFSEGKDLVVSVMSPMGEEQICAPKDIGPKNKLLGLGACYFYFLLKQKYFCNPFILVCSSPGV

SEQ ID NO: 283617 - protein, 72 aa, Glycine max
  Clone ID: PAT_MRT3847_9812C.1.pep
PRIEGEDVPFDSATTLQVRVWPSLLSYLTRECSLFLIDGGLSTTVSGEGEELGHLDLSGAWILRDHNTFSSY

SEQ ID NO: 283618 - protein, 138 aa, Glycine max
  unsure (1)..(138): unsure at all Xaa locations
  Clone ID: PAT_MRT3847_98130C.1.pep
KLFVTCIRTSADVVYLRQXAIKFRTAYVSPNSRVFAMGELAMDPKLIARRYLRSEFFLDLVATLPLPQTVIRFIMPALRSSHADHTNNXYVLRLYMILPLSSQIINATGVVTQTDWAGAAYNLLLYMLASHVLCASGY

SEQ ID NO: 283619 - protein, 37 aa, Glycine max
  Clone ID: PAT_MRT3847_98131C.1.pep
SLQSFPSMPTITQIIDKPVFQIQGEQKLRSKKNGYTF

SEQ ID NO: 283620 - protein, 119 aa, Glycine max
  Clone ID: PAT_MRT3847_98132C.1.pep
EFRINSKAGKKFFSFLPGEVLLASLDGFSKVCDAVEVAGKNVMSTSSTVTTELVDHRYGEQAAEATSEGFSAAGHALGTAWAAFKIRKALNPKSVLKPTSLAKAGAKAAASEFKAKSSK

SEQ ID NO: 283621 - protein, 55 aa, Glycine max
  Clone ID: PAT_MRT3847_98133C.1.pep
NTRSGVRLQLIANQSHLEAWEHADDEADALHMAIVVESDDTVQAVGACRLSLLKL

SEQ ID NO: 283622 - protein, 68 aa, Glycine max
  Clone ID: PAT_MRT3847_98134C.1.pep
MPNTGHINVFTGHKWQIRYNCTVITVKVKALVRFAVNNVLPPLIEPLCAWGDACIIGTVCSMESRCKY

SEQ ID NO: 283623 - protein, 54 aa, Glycine max
  Clone ID: PAT_MRT3847_98135C.1.pep
KEIVVSYLNKRGQVRVIALMNITKNPQNSVNLGFIKRTDAPQNKLNGFYLIWGE

SEQ ID NO: 283624 - protein, 44 aa, Glycine max
  Clone ID: PAT_MRT3847_98136C.1.pep
CLLVILWVPVVVYAIIVNHGYNANKIDKFGILVSYPLTITSFLI

SEQ ID NO: 283625 - protein, 59 aa, Glycine max
  Clone ID: PAT_MRT3847_98137C.1.pep
SPTRPEAMRYSFLAKGAKRAPPVGVLYAVVDDIIEERLKVEGDGDRKNKGKSYAEFYFS

SEQ ID NO: 283626 - protein, 83 aa, Glycine max
  unsure (1)..(83): unsure at all Xaa locations
  Clone ID: PAT_MRT3847_98138C.1.pep
LACGSWRFTALSSECLVHLPPDAMCQDASRSRGPLVSGPXPEHTGEPEXLYFIPTGMLRYGATCLFKHPPNRKLAIAAARMKG

SEQ ID NO: 283627 - protein, 313 aa, Glycine max
  unsure (1)..(313): unsure at all Xaa locations
  Clone ID: PAT_MRT3847_98139C.1.pep
MDNNNWRPNQGTEANMDTSDWRGGLHHESRQRIVNKIMDTLKRHLPVSVQEGLHELQKIAQRFEEKIFTAATSQSDYLRKISLKMLTMETKSQGSMAPNLPTNQGGPSNKPPDPGLGIPPQVHNPGQQHPIPMPNQPPNRQQLLPQNIQNSIASQPSNIAQAPIQNVGQNNPNMQNIPGQNSVGSTISQNSNMQNMFPGSQRQIQGRQQVVXQQQQQQSQNSQQYIYQQQMQHQLLRQKLQQQQQQQQQQQQQQQQQQQQQQQNLLQSNQLQSSQQPAIQTSTVMQQPSMMQASLPSIQHNQQSNNQQSTQSV

SEQ ID NO: 283628 - protein, 190 aa, Glycine max
  unsure (1)..(190): unsure at all Xaa locations
  Clone ID: PAT_MRT3847_9813C.1.pep
MVSGALKTTENSLHKQASQVSDANDAVADPDIPAKRARLQKEQKDLTFQDIYQNDGVFDDEDSDWEPFQLHKCMDFEIKKWFCRKCTMVNLDHDDCCYICGEHTDSKILSLGFFASPLAQDEDLTEVQGIVKGLKDVGSQESVANSSTAIGXDERMLLHAENXVEKKSTLHPERPDRLQAIAASLARAGI

SEQ ID NO: 283629 - protein, 64 aa, Glycine max
  Clone ID: PAT_MRT3847_98140C.1.pep
TVKRITFECILAAGATGGSAGKLTVKYQTKENVHPNPEDLKIGKVESIALSKPVEAYLWANPHY

SEQ ID NO: 283630 - protein, 75 aa, Glycine max
  Clone ID: PAT_MRT3847_98141C.1.pep
HTNKNQQPFTEGALDSSLTEIDPYCLGKFSISQKLKTIFGDKLTFSLHINKMLLSTFPKISLSPSDTLDAPVFLN

SEQ ID NO: 283631 - protein, 103 aa, Glycine max
  Clone ID: PAT_MRT3847_98142C.1.pep
FHNYGLNYHPEGSYCQLSLLIMHAEEIPAEPDNLKEQGTTTIGHSRETTSQSGSLGSVGDCPLYPPNVYAPQAQAFYYRGFDNGNGEWDEYSSYVNSEGLDIG

SEQ ID NO: 283632 - protein, 82 aa, Glycine max
  Clone ID: PAT_MRT3847_98143C.1.pep
ASKAARANTISRKNKEIFFYDQQLYMGVKIKPGGGNQYHALIYIEPDSTRYDPYIVKNVPYYKANNALKTKAIKIDSPLKPI

SEQ ID NO: 283633 - protein, 219 aa, Glycine max
  unsure (1)..(219): unsure at all Xaa locations
  Clone ID: PAT_MRT3847_98144C.1.pep
MRIFLLIILTPKRYLSIVKEEGLEISQPALDPTKSEVHHPLTVHKAVSKVHRXKGSGRCDDKSTAPPCIGWVEMMAPVFSKKSWQCVWHLIQNDLIHAWGLDRQLGYCAQGDRMQNVGVVDSEYIVHLGLPTLGGSNGNEAPSGSSGDNRAKVSNIGIRIMXIYAPLAPAPSDSPGDNYTQVRMQSYIEMQVFGKRWKDAAEKDKCWIDPYEQANKTSH

SEQ ID NO: 283634 - protein, 111 aa, Glycine max
  unsure (1)..(111): unsure at all Xaa locations
  Clone ID: PAT_MRT3847_98145C.1.pep
RKSEKPLRMKCMVKTFWKEXGKVNEAVKAVRDMERRGVIGTASVYYELACCLCNNGRWQDAILEVDNIRSLPHAKPLEVTFTGMIKSSMDGGHINDCICIFEYMKEHCVPN

SEQ ID NO: 283635 - protein, 177 aa, Glycine max
  Clone ID: PAT_MRT3847_98146C.1.pep
MAASDGCSSFLTLSCAGAVQNQHVSHPTTFLGVPKNNQRKRKTPHRLVVVAVTQGSAESSKSDEKIPSWAKPDSDEPPPWARDEPNNNSSQQEGFEIPFYAYLLASAITAIAAIGSIFEYVNQKPVFGVLSSDSVFYAPLLGFFVFTGIPSSAFLWFKSVQAANKEAEEQDKRDGYL

SEQ ID NO: 283636 - protein, 436 aa, Glycine max
  Clone ID: PAT_MRT3847_98147C.1.pep
MLLDTLTLFLGSLFFISLHFIHLSAMNALAATNRNFRRAAHILGLDTKLENSLLIPFREIKVECTIPKDDGTLVSYVGFRIQHDNARGPMKGGIRYHPEVDPDEVNALAQLMTWKTAVADIPYGGAKGGIGCNPRDLSVSELERLTRVFTQKIHDLIGIQRDVPAPDMGTNSQTMAWILDEYSKFHGHSPAVVTGKPIDLGGSLGREAATGLGVIFATEALFAEYGKSISDMTFVIQGFGNVGTWAAKSIYERGGKVIAVSDISGAIRNPNGIDIPALLKHKEGNGNLKEFSGADIMDPDELLVHECDVLIPCALGGVLNKENAADVKAKFIIEAANHPTDPDADEILSKKGVIILPDIYANAGGVTVSYFEWVQNIQGFMWDEEKVNRELKKYMTKAFRNIKAMCQIHNCDLRMGAFSLGVNRVARATLLRGWEA

SEQ ID NO: 283637 - protein, 63 aa, Glycine max
  Clone ID: PAT_MRT3847_98148C.1.pep
SFIIGLTDIVVQVSNIIRRLPPWKKFYEVNLATFQTVVYRFQSSVDVFTCATFSALRKNQRAS

SEQ ID NO: 283638 - protein, 105 aa, Glycine max
  unsure (1)..(105): unsure at all Xaa locations
  Clone ID: PAT_MRT3847_98149C.1.pep
TASFSGRIAPCASSPSSPPLPPLNPEPSYVAADAWAEAEKTTAEILSRIRPTLVDDRRRREVVDYVQRLNLVRRALRGFYIWVSSAKTXFPKGDIDLTALNCQNI

SEQ ID NO: 283639 - protein, 63 aa, Glycine max
  Clone ID: PAT_MRT3847_9814C.1.pep
FPSPPPTVEIHRGDPFNRSITTKRRFSLHNLVARGFTKHMLIKTQTEHTTDPGFRRPTLRAFS

SEQ ID NO: 283640 - protein, 43 aa, Glycine max
  unsure (1)..(43): unsure at all Xaa locations
  Clone ID: PAT_MRT3847_98150C.1.pep
HWNFVHMISCCDDFMLSFWLSPIYPSPLMEADLFFTNLLXKKI

SEQ ID NO: 283641 - protein, 341 aa, Glycine max
  Clone ID: PAT_MRT3847_98151C.1.pep
MANDALQVNLDNNSQLGITQHGSDWLWAVFAVMLFTDLIVIGWHFTVPRGQRLFHQLGAIILTTAAIAYFSMASGLGYTPIATEFAYLGYPVGTLRQIWYVRYIDWVITTPALLLELCLASGLPLSDIVTLIFFDLVMIITGLVGGLVKSSYKWGYYTFGCVALFYIWWVLAGPARVSAGALGKDFQKSFTMSALILSFLWLLYPIAWGLADDGSVIYPDSEMIFYGVLDILAKPVFLIIHLISLRNCDLTRLQLQSGKYTTSAAAITTHDMEKNPRTTQNTGMIANDPVAPAGHDNMAAHGKKGFFQRKGKYDAQPVNADHPADANTTMPRTSEATMASR

SEQ ID NO: 283642 - protein, 91 aa, Glycine max
  Clone ID: PAT_MRT3847_98152C.1.pep
YFFFFVLFSFLHGDLGERATLEAAATSQPLVTSVASAEPRKGSDILVEALEPLGVTNVFSYPGGAPMETHQSLTPSFPIPNSLPRHKQGGF

SEQ ID NO: 283643 - protein, 52 aa, Glycine max
  Clone ID: PAT_MRT3847_98153C.1.pep
LANSLTTATKIFILPYKWLVMLSPNPHSLFHTKELCLKRQNPLGARNTNTTF

SEQ ID NO: 283644 - protein, 62 aa, Glycine max
  Clone ID: PAT_MRT3847_98154C.1.pep
SSVSSVSKENLVSSQDQVSQPTFFEAVTNTAQAAARIQAAFRAHSFKARKERRAAADAGLHG

SEQ ID NO: 283645 - protein, 155 aa, Glycine max
  Clone ID: PAT_MRT3847_98155C.1.pep
ATSSLSGNFSLLRHSETQSRSLLLLGGSSVKLFRSKHEASTCHGARVAAAVPRASAPEVAVVEKGREKVRVLKLGLICGGPSAERGISLNSARSVLDHLQGDDLHVSCYYIDCNLNAFAISSAQVYSNTPADFDFKLESLAQSFQTLSDLAKHLA

SEQ ID NO: 283646 - protein, 55 aa, Glycine max
  unsure (1)..(55): unsure at all Xaa locations
  Clone ID: PAT_MRT3847_98156C.1.pep
PFXFFFFFFFFFFFFFFFFFFFFGGERVSNLNKQKPCPFFVFFPIFTQLNWGRLF

SEQ ID NO: 283647 - protein, 211 aa, Glycine max
  Clone ID: PAT_MRT3847_98157C.1.pep
MSKLQSDALREAISGIMADSKEKNRKFVETIELQIGLKNYDPQKDKRFSGSVKLPHIPRPKMKICMLGDAQHVEEAEKIGLDWMDVEALKKLNKNKKLVKKLAKKYHAFLASEAVIKQIPRLLGPGKFPTLVTHQETLESKVNESKAMVKFQLKKVLCMGVAVGNVSMEEKQIFQNVQLSVNFLVSLLKKNWQNVRCLYLKSTMGKSYRVF

SEQ ID NO: 283648 - protein, 206 aa, Glycine max
  unsure (1)..(206): unsure at all Xaa locations
  Clone ID: PAT_MRT3847_98158C.1.pep
MADSKEKNRKFVETIELQIGLKNYDPQKDKRFSGSVKLPHIPRPKMKICMLGDAQHVEEAEKIGLDWMDVEALKKLNKNKKLVKKLAKKYHAFLASEAVIKQIPRLLGPGLNKAGMYCLFFGKFPTLVTHQETLESKVNESKAMVKFQLKKVLCMGVAVGNVSMEEKQIFQNVQLSVNFLVSLLKKNWQNXCLYLKSTMGKSYRVF

SEQ ID NO: 283649 - protein, 253 aa, Glycine max
  unsure (1)..(253): unsure at all Xaa locations
  Clone ID: PAT_MRT3847_98159C.1.pep
MSKLQSDALREAISGIMADSKEKNRKFVETIELQIGLKNYDPQKDKRFSGSVKLPHIPRPKMKICMLGDAQHVEEAEKIGLDWMDVEALKKLNKNKKLVKKLAKKYHAFLASEAVIKQIPRLLGPGLNKAGKFPTLVTHQETLESKVNESKAMVKFQLXKCPTLVTHQETLESKVNESKAMVKFQLKKVLCMGVAVGNVSMEEKQIFQNVQLSVNFLVSLLKKNWQNMMKRFFIVSSFYNMPVQYALNVISHQ

SEQ ID NO: 283650 - protein, 89 aa, Glycine max
  Clone ID: PAT_MRT3847_9815C.1.pep
HSFCSPMVVVNGCKVFGLGSVHRTVFGIVCFLLLSHLFLLMLVIQTVMYFVCKSYPREIVDKSALSYHLEVYECYEPLKAKDVQLDYHV

SEQ ID NO: 283651 - protein, 52 aa, Glycine max
  Clone ID: PAT_MRT3847_98160C.1.pep
ASILNDCFFFKSKYGELLDVYSSTIGKYLWKNSSPLLFNVVIGESVPPLLRM

SEQ ID NO: 283652 - protein, 216 aa, Glycine max
  Clone ID: PAT_MRT3847_98161C.1.pep
MSKLQSDALREAISGIMADSKEKNRKFVETIELQIGLKNYDPQKDKRFSGSVKLPHIPRPKMKICMLGDAQHVEEAEKIGLDWMDVEALKKLNKNKKLVKKLAKKYHAFLASEAVIKQIPRLLGPGLNKAGKFPTLVTHQETLESKVNESKAMVKFQLKKVLCMGVAVGNVSMEEKQIFQNVQLSVNFLVSLLKKNWQNVRCLYLKSTMGKSYRVF

SEQ ID NO: 283653 - protein, 53 aa, Glycine max
  Clone ID: PAT_MRT3847_98162C.1.pep
LLLKFFILIAYIYTLNVFFPTITIPKFNFESKTLCNLLKFYITRLILVGYNCN

SEQ ID NO: 283654 - protein, 56 aa, Glycine max
  Clone ID: PAT_MRT3847_98163C.1.pep
SDNLATKIERKNKPRSCSTPPQESRNSWCHKTDKGILSLSGPTNSRVCVMMKLNVA

SEQ ID NO: 283655 - protein, 87 aa, Glycine max
  Clone ID: PAT_MRT3847_98164C.1.pep
EGKVLPTNFFNPTRGLLHPNKVFGHLKNKGGAKKGAPFLATPGQKKPIFRGGNKKNPVFRGSPGNIGANEGGIISAKPWGEGGRNPK

SEQ ID NO: 283656 - protein, 91 aa, Glycine max
  unsure (1)..(91): unsure at all Xaa locations
  Clone ID: PAT_MRT3847_98165C.1.pep
PNSDPRRFPFSSLTSSTNTPQPIPFSLXSPRCWCWCWHVPLEPRFRHPLRRAPRRQRPRRHGGAVGVAWXEDQAPQEVRPSGTIRAALTHS

SEQ ID NO: 283657 - protein, 142 aa, Glycine max
  Clone ID: PAT_MRT3847_98166C.1.pep
DQQRMILSFDLATETYGEVLLPDGDHDKICSPTLDVLRDCLCVCFSDCRKGHWIVWLMKEYGVPNSWTKLVTIPYIKLGICRWSHLFVPLCISENGVLLLKTTSSKLVIYNLNDGRMDYLRIVDELGFDIHVYHESLVSPQF

SEQ ID NO: 283658 - protein, 324 aa, Glycine max
  Clone ID: PAT_MRT3847_98167C.1.pep
MAATASSFGTTWCLRRAAQAFAISHSHILRNNVKLSLQRNFCSHLLSVSTSLASGVSQTVQALKGEVDLLLKGVGERSVTKEVKHILEMARRASLKREILHTDFLTPPVLKESMQVLEKLADVKAIAQGGYPQAERCRISVGQTEQLSSDPDIISALSITGNFQFEPCSHGDFLSSILGIGIVTEKLGDIILQGEQGAQIIVVPELVEFLMSFLFKVRNGKVSCNKIPLISLDYEPPRTKSFKTIEASLRVDALASAGFKVSRSKLVDMISNGDVRINWIPVTTKGTTLKSGDIVSISGKGRLKIGEINSTKKGKFAVELIRYL

SEQ ID NO: 283659 - protein, 150 aa, Glycine max
  unsure (1)..(150): unsure at all Xaa locations
  Clone ID: PAT_MRT3847_98168C.1.pep
MCPFWQRGLKIKGTMGAQHNTVADINGIITDVGILAQCXGSIGCAHDALAFATAAISIQLIRAPKADWXPDELERALLEDERDHYGPLHAGAQAYEVHSECNRDFGIPAACSIXNFMPSDFFLEYLSLDYIPNHGTISFVFNCWVYNSIY

SEQ ID NO: 283660 - protein, 271 aa, Glycine max
  unsure (1)..(271): unsure at all Xaa locations
  Clone ID: PAT_MRT3847_98169C.1.pep
MNDITGGSRSFLDLHPEIHASAFSQDVISSRQRTDDYVNMGNKVEHTSAESVVQQFTKDDVTNPQITTFQQDESPIQVMQDKFEESHFEDLIRLSLDPMNNLTFSKDILHNVREILHALSLKWDELTLKRSCDQLLDPSTFVELKELTSQLSGXEILHDCVIEIFMQVYQNCGFPPHVSTKNPNVQAYVVKKLLVKEITELVKLHFHPRPSPLTLEQLAEKDLARRGSWLNIQVVAEDIAIEVEKDVLEKMVLEIASEMDVRSIVYLLLVG

SEQ ID NO: 283661 - protein, 102 aa, Glycine max
  unsure (1)..(102): unsure at all Xaa locations
  Clone ID: PAT_MRT3847_9816C.1.pep
MLCSELSHFPGSNLFSSTPFITGLKKDPRKGEHLHILSDYFSASTPKKKRIPMQTAKIRVKMDCDGXERRLRNTVSNMSRVKQGEVNRKQSTVTLTGHVDRN

SEQ ID NO: 283662 - protein, 88 aa, Glycine max
  Clone ID: PAT_MRT3847_98170C.1.pep
CHNTYCSSKMWIFFVCFFVFIFCILCSVTPFYGFTSYMTGFCWSWMFLSCSIIFQLKLHDIVIQFCSYELCSTYTFIIYLLFSYLFIL

SEQ ID NO: 283663 - protein, 669 aa, Glycine max
  Clone ID: PAT_MRT3847_98171C.1.pep
SRWSISTTSIADGRWHIVTMSIDADLGEATCYLDGGYDGYQSGLPLCVGSSIWEQGTEVWVGVRPPTDIDAFGRSDSEGVESKMHIMDAFLWGRCLTDDEVSSLYTSMASADFSALDFPEDNWQWADSPSRVDGWDSDPADVDLYDRDDVDWDGQYSSGRKRRSERDGMMVDIDSFSRKYRKPRIETQEEINQRMLSVELAIKEALYARGERRFTDQEFPPNDHSLFVDPANPPAKLQVVSEWLRPGEIGRQNHLDCRPCLFSGAPNPSDVCQGRLGDCWFLSAVAVLAEVSRISEVIITPDYNEEGIYTVRFCVQGEWIPVVVDDWIPCELPGKPAFATSKKGYELWVSILEKAYAKLHGSYEALEGGLVQDALVDLTGGAGEEIDMRSGEAQIDLASGRLWSQLLRFKQEGFLLGAGSPSGSDVHISSSGIVQGHAYSILQVRDVDGHKLVQIRNPWANEVEWNGPWSDSSPEWTDRIKHKLKHVPQSKDGIFWMSWQDFQIHFRSIYICRIYPSEMRHSVHGQWRGYSAGGCQDYDTWNQNPQFRLTATGQDASFPIHVFITLTQGVGFSRTTAGFRNYQSSHDSQMFYIGMRILKTRGRRAAFNIYLHESVGGTDYVNSREISCEMVLEPEPKGYTIVPTTIHPGEEAPFVLSVFTKASITLEAL

SEQ ID NO: 283664 - protein, 67 aa, Glycine max
  Clone ID: PAT_MRT3847_98172C.1.pep
MKYNIANHSNGCQNHLEIDDELKLRAFWRQRIPHDDLCDVLGEEFKGYVFKITGGYNTQRFPMKPGV

SEQ ID NO: 283665 - protein, 63 aa, Glycine max
  Clone ID: PAT_MRT3847_98173C.1.pep
NFHFHPSSKPPGSSEACFPPRERSKKLKCFWNLDFFFIFVPEKHGGKSSAFSTAPFPEKLAFF

SEQ ID NO: 283666 - protein, 122 aa, Glycine max
  unsure (1)..(122): unsure at all Xaa locations
  Clone ID: PAT_MRT3847_98174C.1.pep
MDEGEGGDPMDQFHRNEAISAVADDGFLGEEDDDYEDLYNDVNVGEGFLQSLRKNEDXGXRNDVVEDKKPVQQPDQDPVVGVSIPGVSGGRGSGIVESKVSGNVDGLQNQGFRRGYSGGGGG

SEQ ID NO: 283667 - protein, 218 aa, Glycine max
  Clone ID: PAT_MRT3847_98175C.1.pep
MTVELMGFPKMEEQKAIQEAASEGLKAMEHLLRLLSYQPSHLHAHHTDATVSNFKKLISLLSRRTGHARFRRAPLPSPPPANPVTLHQPPSTFVPSHSQSLTLDFTKPSIFASNAKSMDLQFSKETFSVSSNSSFMSSAITGDASVSYGKLGSSLFLTPPPVSAGKPPLSSAPIKKRCHDHREHSDEISGKLSGSSKCHCTKRRKNRVKKTVRVPVIS

SEQ ID NO: 283668 - protein, 76 aa, Glycine max
  unsure (1)..(76): unsure at all Xaa locations
  Clone ID: PAT_MRT3847_98176C.1.pep
QHPFSCLLLTAPHTLMEERVSSSSLPSPSPPPLEKNHNTDKLKLPDLDPGTXRCPGPQGPSLPCSAAGKRPNRREP

SEQ ID NO: 283669 - protein, 51 aa, Glycine max
  Clone ID: PAT_MRT3847_98177C.1.pep
LELKCYPKRNFQYPTKTTTKDRTAHNPDPPPSRHSHDPTNTGHQQLGTHSI

SEQ ID NO: 283670 - protein, 89 aa, Glycine max
  Clone ID: PAT_MRT3847_98178C.1.pep
AQDLNHYEVWHIQSAFPQDKGSQRWHLFGNQKWDSLNSDGWSPTSKQNLSLRRMRISNLRDSFVIDTNLPWVHAILNLRLSNHYFAARA

SEQ ID NO: 283671 - protein, 81 aa, Glycine max
  Clone ID: PAT_MRT3847_98179C.1.pep
FFLTLVWWPKFCNVVFLWAQSFKPNLSFFFSFYATPVFYFQPLAYFNGSPQATSFKIGFGLRGIILWFSNFPVGGVKNKKI

SEQ ID NO: 283672 - protein, 45 aa, Glycine max
  Clone ID: PAT_MRT3847_9817C.1.pep
EAKLKYAVVTGANKGIGFGTCKKLALNGVKGGLTARDEKKGPGTF

SEQ ID NO: 283673 - protein, 73 aa, Glycine max
  Clone ID: PAT_MRT3847_98180C.1.pep
RITPSSKPSDGKMLNQMANTRHTLGRIEQDKHQHPFNAHQIQQALHHMLLNASCVFHLALCANTSSAGPAMLR

SEQ ID NO: 283674 - protein, 43 aa, Glycine max
  Clone ID: PAT_MRT3847_98181C.1.pep
RISSFITKKKKKKKKKKKKKKKKKKKKKKKKKKKKKKKKKKKK

SEQ ID NO: 283675 - protein, 288 aa, Glycine max
  unsure (1)..(288): unsure at all Xaa locations
  Clone ID: PAT_MRT3847_98182C.1.pep
SSGTSNGIRNSDCAKSNSNVNGHNNSSCKSDGAKSNNNYTRNSXGASSNYSQTSEDARGNINSAKSIGGNNRNSDSTKSGDNSSNNRNSDNTKSGDNGNNHHNIDVAYGNGSTNRNNDSSKIGDNGDNNRINDSFKSNSNANGHNNSSDKSGGAKSNGNSNNNSNGGGAKSNDIGNGNSNYNRNSDGPKSNVIGNYNQNSGGKSSGNGNEKSNSNRSSGGAKSNGNSIQNSNSNRTRSNANANNNYTNNPFQNNSTGAGDTRNRNERQVQSRINIEIIMKLLAWCKGN

SEQ ID NO: 283676 - protein, 186 aa, Glycine max
  unsure (1)..(186): unsure at all Xaa locations
  Clone ID: PAT_MRT3847_98183C.1.pep
GSSSELKKCFAWGLKSLHQAKQCHCLLLRLGLHQDTYLINLLLRSSLHFAATQYATVVFAQTPHPNIFLYNTLIRGMVYNDAFRDAVSVYASMRQHGFAPDNFTFPFVLKACTRLPHYFHVGLSLHSLVIKTGCDWDVFVKTGLVWLYSKNGFLTDARQVVDEIPEKNVVSWTAXICGYIESRCFG

SEQ ID NO: 283677 - protein, 88 aa, Glycine max
  Clone ID: PAT_MRT3847_98184C.1.pep
RCHPTVVDRADSSYAGGVYLVTIHLPPDYPLKPPNGAFRTNECRPNLYSNECICLDILTELGSCGLTISRVLRDICVLVGDEDSGEGL

SEQ ID NO: 283678 - protein, 156 aa, Glycine max
  unsure (1)..(156): unsure at all Xaa locations
  Clone ID: PAT_MRT3847_98185C.1.pep
KARYLPTNGNPVVKIAVSGQHHVTSMPARKSTVLFEWNQTFAFARDAPDSSSVLEVSAWDPQASEALLGGVCFDVNEIPVRDPPDSPLAPQWYRLEGGGALHGDLMIATLMGTXQADESFPDAWKSDTFAHVNSRAKVYQSPKLWYLRATLLEAQD

SEQ ID NO: 283679 - protein, 97 aa, Glycine max
  Clone ID: PAT_MRT3847_98186C.1.pep
ILILQQHQPSSFSWAQHYVTLHSQISPNSVTRSLHQKHPTILPGQVSFPNNFPPLSLKASQFCIPSCGIHLNCTGFETPLKNSHFFNWVCFVCGLSV

SEQ ID NO: 283680 - protein, 86 aa, Glycine max
  unsure (1)..(86): unsure at all Xaa locations
  Clone ID: PAT_MRT3847_98187C.1.pep
WELYQCSWGAKFXIIKPIHTXXGSICMSETDTCLLVYKHNDKSEILIPFKQKELIHSSSKVVEVSRSNLIEXILYELEKGNSHXTA

SEQ ID NO: 283681 - protein, 247 aa, Glycine max
  Clone ID: PAT_MRT3847_98188C.1.pep
TIKNKISLAELFDSNRGQLNEKRILNLMNIVIQLRKVCNHPELFERSEGSTYLYFGEIPNSLPPPPFGEMEDVYYSGGHNPISYEIPKLVYQEIIQSSETLSSAVGPVVSRESFHKHFNIFRPENVYRSVFSEDMYSKSGNFGFTHMMDLSPQEVTFLATGSFMERLLFSMMRWEQKFIDEAVDFLTETIDDDPECSYLEKEKVRAVTRMLLVPSRSETLVLQKKFQTGPSHAPFEALVVPHQDRVL

SEQ ID NO: 283682 - protein, 126 aa, Glycine max
  unsure (1)..(126): unsure at all Xaa locations
  Clone ID: PAT_MRT3847_98189C.1.pep
MATEYKLKGLTSVDLKNGQKAEYEVEGIEGGKVLLVKAQDGLHAMSPNCTHYGAPMVKGVDTGDGRITCPWHGACFKIXTGDVEDAPALDPLAKVKVVHKDGRCIHRGRRIHNQSLQEEVEHQVLC

SEQ ID NO: 283683 - protein, 91 aa, Glycine max
  unsure (1)..(91): unsure at all Xaa locations
  Clone ID: PAT_MRT3847_9818C.1.pep
MKEVLLCRAWTAMRCLLSRNICLDCRPEELHFPMDRLAPAGDVHIPLAYDCGEPQRFDYEQTADPYDASEAXYHMNRQILAGREIYVIEAE

SEQ ID NO: 283684 - protein, 83 aa, Glycine max
  Clone ID: PAT_MRT3847_98190C.1.pep
LVNAVSRVLMAFSPNYMSMLLFRLLQGLVSKGNWMAGYTLITEFVGSGSRRTVAIMYQMAFTVGLVAITGLAYALPHWRWLQL

SEQ ID NO: 283685 - protein, 119 aa, Glycine max
  unsure (1)..(119): unsure at all Xaa locations
  Clone ID: PAT_MRT3847_98191C.1.pep
SSIFDKAELDNIFLFFCQPTNPQMHSNATQTFEGEXNNIYAFHAAQITPPRNVENMKCGRCNGTAISINXVGLYAPRGTAVLPSRALKLXGPAQKAGCKTIVLATLPDQEGAICQEALH

SEQ ID NO: 283686 - protein, 52 aa, Glycine max
  Clone ID: PAT_MRT3847_98192C.1.pep
NLNAKGEFSLGRNLGPFLLNSLTPGLEKLLLRLENFSILKLGLHLYFGIIFF

SEQ ID NO: 283687 - protein, 68 aa, Glycine max
  unsure (1)..(68): unsure at all Xaa locations
  Clone ID: PAT_MRT3847_98193C.1.pep
LWLGNFMYIETIKEALERECPGGFSCAGIHVLSVRYGIVSLGGTHITRKTGSRDCTMLRADVVXQFLP

SEQ ID NO: 283688 - protein, 187 aa, Glycine max
  unsure (1)..(187): unsure at all Xaa locations
  Clone ID: PAT_MRT3847_98194C.1.pep
GRSLEGNYPFERKSRSRWQKVSSTKAQLVSGKTFKYDIIGAGSHSSGDFPXETEDQEKPEPIDXRGRQRIDPQYNEDQAQMETNSLKLSLDDVETPKGSMLDLKISQSKIALPKNTEGGTIFRSDLLANALTDGNLRASVDTQRTHDIKGKMKMAATAGIPENTGIASACASNSYFRRRPSSGFYTN

SEQ ID NO: 283689 - protein, 137 aa, Glycine max
  Clone ID: PAT_MRT3847_98195C.1.pep
YQKKKKKKKKKKKKKKKKKKKKKKEKKIKKKKNKKKKNKKGGGLFKGPNFSSPGWQVINFFKGHPNYISRAVVLNPRTGKTRGVPKLKGLEQNPFLPSGKNKKKARPVRLSNNFPPLNGKGHPPLTGHLTAGGGGVP

SEQ ID NO: 283690 - protein, 40 aa, Glycine max
  Clone ID: PAT_MRT3847_98196C.1.pep
CLLIMILRVLIVTALSDLRTHALCVRVPADDNANCPRFSS

SEQ ID NO: 283691 - protein, 82 aa, Glycine max
  Clone ID: PAT_MRT3847_98197C.1.pep
KSGYKRSLKPISRLALPESTFGRLIRQEEQKKRLLRMFVINEQLLFFGCYSTSGLIHETVGWLKAYIGTQVGHPKKLGSFRL

SEQ ID NO: 283692 - protein, 207 aa, Glycine max
  Clone ID: PAT_MRT3847_98198C.1.pep
MLFLSWGRPSPQDQKTCINKSGTFNYDDKYKGATAKSVASLKADEGLSKDGFLLNEARVLVGSGIETFEKGKSALRSWRHFGLNWAFVDPKTPVQQGVKFCVCVKEFFPWLMMPLQVVYVNETGTAKYRTASFGFGSGTLHGHLLAGEERFSIEIDENNQVWYEVLSFSKPASILSLVGYPYVMLRQKYFANESAKAMLKHINSSKS

SEQ ID NO: 283693 - protein, 73 aa, Glycine max
  Clone ID: PAT_MRT3847_98199C.1.pep
APLRAINRRSGKYIRLRLRELGCTIYPAYDRAEDKDATRLRMGVWESSKQILSVEAGETRASGNLRWLRQSSC

SEQ ID NO: 283694 - protein, 80 aa, Glycine max
  unsure (1)..(80): unsure at all Xaa locations
  Clone ID: PAT_MRT3847_9819C.1.pep
NAPKKQLASKASPKXAPATFGVYNRHSFRPLTVALTEILQXQHSTNPLMTKLPYQTLVKXIAQDIKTHHSFQSNAMSDLH

SEQ ID NO: 283695 - protein, 55 aa, Glycine max
  Clone ID: PAT_MRT3847_981C.1.pep
KCCCHKKKTLILEKKIRGSIFPSQPCESLVMESPFFVYLCHVVPTAVGVLPVRFF

SEQ ID NO: 283696 - protein, 83 aa, Glycine max
  Clone ID: PAT_MRT3847_98200C.1.pep
KIPLRQAPLLTNILLGATTPSTTKTIFIIKKRFEILFALKQKNLGNKVFFFFPIARNSPLSQKIWTFYKEGAKGGPNKPNVPV

SEQ ID NO: 283697 - protein, 41 aa, Glycine max
  Clone ID: PAT_MRT3847_98201C.1.pep
QLAKCGFVASGECCGTLECYLQRRCQTTDAELNLGDSIDEM

SEQ ID NO: 283698 - protein, 40 aa, Glycine max
  Clone ID: PAT_MRT3847_98202C.1.pep
YNFIYWSLAKQNRRQHKDKESYGRYYSFTKITLLLQLTLL

SEQ ID NO: 283699 - protein, 81 aa, Glycine max
  Clone ID: PAT_MRT3847_98203C.1.pep
MYSSMAATNEAEEAAGGKRVQYPLDSSSYKLLNEIGEGVSAVVYKALCIPMNSAAVAIKSIDLDRSRPDLDDVRREAKPYP

SEQ ID NO: 283700 - protein, 738 aa, Glycine max
  unsure (1)..(738): unsure at all Xaa locations
  Clone ID: PAT_MRT3847_98204C.1.pep
MNGVTHLEPDESEFVEVDPTGRYGRYNEILGKGASKTVYRAFDEYQGIEVAWNQVKLFDFLQSPEDLERLYCEIHLLKTLKHRNFTNFHASPHVRANRNINFVTEMFTSGTLRQYRQKHKRVNIRAVKHWCRQILSGLLYLHSQDPPVIHRDLKCDNIVINGNQGEVKIGDLGLAAILRKSHAAHCVGTPEFMAPEVYEEAYNELVDIYSFGMCILEMVTFEYPYSECTHPAQIYKKVISGKKPDALYRVNDPQVAXLVQRCFVTPSLSLSAIESSNDPLLQIDDYGSNLKTVENGELDEFGPLMRQPFFDLHRSYSNFSNEYTNGFGYEGDWGPHPAEIEPSGIELFEYHDDDEPSEDVDISIKGKRKDDGGIFLRLRIADKEGRIRNIYFPFDIEMDTAISVATEMVAELDMTDQDVTRIADMIDGEIASLVPEWRPGPGIDETPRFANEGFCHNCVSNHTSSGSFLDFLSNNPGNKNLQLLECCRHGCASMHGRFGEITFQSEEYDNHARGDLNVSSQLDSLQYQELWNQHESRELSPVESDQSHSDEQCEQLDKPIPAKDKAQDVWEKKFSPNAANSLRNLSGSHDFSTIRSTYCDLEDDYEKEIQKELRWLRAKYQMELRDHKDGQFGQCSHSSNSEHRTENGFLSPSLTETLKGGNNGTRLKPITTKWNCDSSSHPHVHESSPNSDTQRAQNCEAIESPGEGMVTAKSFYTGSLLPHSLHRTVSLPVDAVDI

SEQ ID NO: 283701 - protein, 149 aa, Glycine max
  Clone ID: PAT_MRT3847_98205C.1.pep
MFEDKFSPNAANSLRNLSGSHDFSTIRSTYCDLEDDYEKEIQKELRWLRAKYQMELRDHKDRQFGQCSHSCNSEHRTENGFLSPSLTETLKGGNNGTQLKPITTKWNCDSSSHPHVHESSPNSDTQRAQNCVAIKSPGEGFSIYPHGNR

SEQ ID NO: 283702 - protein, 60 aa, Glycine max
  Clone ID: PAT_MRT3847_98206C.1.pep
KGEKINLKPHPRGVNLHQRGGQKIFKVSKKIQLLGFHKNHGGHGNEPPQQNKSGVQKQRS

SEQ ID NO: 283703 - protein, 35 aa, Glycine max
  Clone ID: PAT_MRT3847_98207C.1.pep
AHTQIRLVYLCVWQPKSSCTKGAFVHAAYLLKNQR

SEQ ID NO: 283704 - protein, 266 aa, Glycine max
  unsure (1)..(266): unsure at all Xaa locations
  Clone ID: PAT_MRT3847_98208C.1.pep
MNELETTDSSASEFVEVDPTGRYGRYNEILGKGASKTVYRAFDEFHGXEVAWNQVKLYDFLQSPEDLERLYCEIHLLKTLKHRNIMKFYTSWVDTANRNINFVTEMFTSGTLRQYRQKHKRVNIRAVKHWCRQILRGLLYLHSRDPPVIHRDLKCDNIFVNGNQGEVKIGDLGLAAIVRKSHAAHCVGTPEFMAPEVYEESYNELVDIYSFGMCVLEMVTFEYPYSECSHPAQIYKKVISGKKPDALYKVKDPEVRKFCEKCLATV

SEQ ID NO: 283705 - protein, 109 aa, Glycine max
  Clone ID: PAT_MRT3847_98209C.1.pep
MNQLQASEFVELDPTARYGRYNEIRGKGASKTVYRAFDEYQGIEVAWNQVKLYDFLQSPEDLERLYCEVHLLKTLKHRSIMKFYTSWVDTANRNINFVTEMFTSGTLRQ

SEQ ID NO: 283706 - protein, 75 aa, Glycine max
  Clone ID: PAT_MRT3847_9820C.1.pep
CHCNCITCDCINHISPQFSTTARMVMLSQRRMQFKILPKPNKKLAPHELKHSTFVPFAKQIHTHKRKTSIMRTRG

SEQ ID NO: 283707 - protein, 90 aa, Glycine max
  unsure (1)..(90): unsure at all Xaa locations
  Clone ID: PAT_MRT3847_98210C.1.pep
MXRXXPVTKTHXXTGDLLTXXEXPISXXXSXSXPXVXSQQPSDXIMXXXXXGXVTDEXVESLNXRXPCSXYXXKEIXRSXIFVANGEDDA

SEQ ID NO: 283708 - protein, 76 aa, Glycine max
  unsure (1)..(76): unsure at all Xaa locations
  Clone ID: PAT_MRT3847_98211C.1.pep
XGITNPCMHAQQLQYHNTCRTTSTYGSDLNSALKLYKIQKEKKSQAKLTDIYVWCFTACSFHINLLYLHTFFRSMG

SEQ ID NO: 283709 - protein, 89 aa, Glycine max
  Clone ID: PAT_MRT3847_98212C.1.pep
AQWFPLLIAITVQNFFHFQKISFSESLFSHALLLKERSIEPKLEFQRWGVIEKNSLHILWNSKQRKNQRYQVGVLGAGSLFSYSQQGFQ

SEQ ID NO: 283710 - protein, 253 aa, Glycine max
  unsure (1)..(253): unsure at all Xaa locations
  Clone ID: PAT_MRT3847_98213C.1.pep
TRPVARSSQPLVGLMMNMRSNMDEKLVAALCSKLDNGSRRKLYIVDARPRKNALANGAMGGGSESSSNYFQSEIVFLGIDNIHAMRESFVRLREYMDTHGRTSSDGMSSFLVSXRQGGSTWGGGNLSSMSASVSTLGDSGWLLHVQNVLAGAAWIAARVAMENASVLVHCSDGWDRTSQLVSLANLLLDPYYRTFTGFQALIDKDWLAFGHPFSDRVGMPSVSGTGNVPFELSRQSSTSNFPPSPMRQSSTFA

SEQ ID NO: 283711 - protein, 147 aa, Glycine max
  Clone ID: PAT_MRT3847_98214C.1.pep
HGPKSIVQAQLFGISLSSPLHCFLPLSLPRALCSPASWHLNSPTRILSYRFSPQTSPLYYFHERSPRPHGTLCCLKNYDLSSSMFFRTLVDPLSNIGVLPSRPWLNSFPFSIVISSDEVFRPWYRPMVSCSSSFLPFITSSKSSTEH

SEQ ID NO: 283712 - protein, 52 aa, Glycine max
  Clone ID: PAT_MRT3847_98215C.1.pep
MMITEFMSSIVQNHDFESRPSVTNHDDYELKSSVTKNNDLEPRPIVTKDDNS

SEQ ID NO: 283713 - protein, 60 aa, Glycine max
  Clone ID: PAT_MRT3847_98216C.1.pep
ALYNYLGTVLNSLLLPTRLPTYINCTLKVQRVTMELTRRHYMLCTNHTSLEPLALCNTYG

SEQ ID NO: 283714 - protein, 32 aa, Glycine max
  Clone ID: PAT_MRT3847_98217C.1.pep
QQNSLIGLSARCNRSCHRTLLHLDLTKFTTQK

SEQ ID NO: 283715 - protein, 45 aa, Glycine max
  unsure (1)..(45): unsure at all Xaa locations
  Clone ID: PAT_MRT3847_98218C.1.pep
RNXXXCXXNAMGKQPXAXWWWLCXAXXTXLTXRQVVLXPRLVVXT

SEQ ID NO: 283716 - protein, 51 aa, Glycine max
  Clone ID: PAT_MRT3847_98219C.1.pep
CCCRLWASSRMGLSFFVSSVCLRSAMQMAEGVVLWMVKEGEVMLLRTPIYG

SEQ ID NO: 283717 - protein, 45 aa, Glycine max
  Clone ID: PAT_MRT3847_9821C.1.pep
SISSGGGLTLNPVGHTRQARCCRITTRSKGRHANNEHHVILHKTK

SEQ ID NO: 283718 - protein, 89 aa, Glycine max
  Clone ID: PAT_MRT3847_98220C.1.pep
LGRPPVPLAVWWVPRLCRLAWRPPVAPSAPGSRFGSTFRGGGVPPPWFGLAVFRSGSPLFPLGRPPGLFCLCPCAVRIVVLVPNKAPIP

SEQ ID NO: 283719 - protein, 131 aa, Glycine max
  Clone ID: PAT_MRT3847_98221C.1.pep
PRRRLAGVGLSLGPPGPHGGPGPFFRGPPARQKAPPFPSGVQSAEKGAWGGSFRKGLQQPPPPFQCPGFRAVLWGSPPILRKLRPRSFPLGCSLCWPPRPPPPSFLVFARPPPPGWGVICFCFIVLFSFFG

SEQ ID NO: 283720 - protein, 74 aa, Glycine max
  Clone ID: PAT_MRT3847_98222C.1.pep
FPPDLQAGQVGLYVPVPVQLPLFSFPVGKAWLAGVPIFYGNPWVAFQALAKTLTRLCTDSAGGSKFILAMPASQ

SEQ ID NO: 283721 - protein, 82 aa, Glycine max
  Clone ID: PAT_MRT3847_98223C.1.pep
AVRTTELSQILRINKTSLMNVLHANPGDAQITMDNLLMRLKGLEGFGFEYPCTDSGRLTHEVLQGGNTRGNFSHECTNNSPE

SEQ ID NO: 283722 - protein, 427 aa, Glycine max
  Clone ID: PAT_MRT3847_98224C.1.pep
LEFSQPSSEKSKGIPLATLLLILFLSAIFPTSLSNQVLNSKKPIPSSSASSLGSSVAFQIKGNVYPLGYYTVSLAIGNPPKVYDLDIDTGSDLTWVQCDAPCQGCTIPRNRLYKPNGNLVKCGDPLCKAIQSAPNHHCAGPNEQCDYEVEYADQGSSLGVLLRDNIPLKFTNGSLARPILAFGCGYDQKHVGHNPSASTAGVLGLGNGKTSILSQLHSLGLIRNVVGHCLSERGGGFLFFGDQLVPQSGVVWTPLLQSSSTQHYKTGPADLFFDRKPTSVKGLQLIFDSGSSYTYFNSKAHKALVNLVTNDLRGKPLSRATEDSSLPICWRGPKPFKSLHDVTSNFKPLLLSFTKSKNSLLQLPPEAYLIVTKHGNVCLGILDGTEIGLGNTNIIGDISLQDKLVIYDNEKQQIGWASANCDRSSNS

SEQ ID NO: 283723 - protein, 52 aa, Glycine max
  Clone ID: PAT_MRT3847_98225C.1.pep
DLICVPFSIPKSQTNIQCKSTHSHNIDVKWTSTESNVLKNIGNRKIQLLSCV

SEQ ID NO: 283724 - protein, 106 aa, Glycine max
  Clone ID: PAT_MRT3847_98226C.1.pep
FSSPKVPLLSDRQGFSGNPCFLSSPCCYPRGLIFLRQGLGQVLGSFQVAGAAMQFLAMSQPFLVNFRPSGENPSRPGDPAGFFFARPGRFRPQKMFFRCRPVLCYF

SEQ ID NO: 283725 - protein, 35 aa, Glycine max
  Clone ID: PAT_MRT3847_98227C.1.pep
LNEFQGSKFFCPQSCLLGWLNIYPCNLFKLNPFSG

SEQ ID NO: 283726 - protein, 170 aa, Glycine max
  unsure (1)..(170): unsure at all Xaa locations
  Clone ID: PAT_MRT3847_98228C.1.pep
QLKGFGLRCCLACVLPCGALDLIRIVHLNGYVEEITRPITAGEVLKANXPNHVLSKPTSQGVVRRILILSPDTELKRGSIYFLIPTASLPEKKKRRCSDDGGNDNDHRNKNDLVKVSSKKSMKSNHDLPSSQQCDNEGFVLSKEKKCSRRDHRSRRGGLWQPRLESISED

SEQ ID NO: 283727 - protein, 68 aa, Glycine max
  Clone ID: PAT_MRT3847_98229C.1.pep
ESFLDAKKKKKKKKKKKKRGPPRKGSPTTHNLIPQRPPWGQQFPLNRHGWNSWIVLANTDHWENFYPP

SEQ ID NO: 283728 - protein, 56 aa, Glycine max
  Clone ID: PAT_MRT3847_9822C.1.pep
KHMLLKVCMVDYLIAELLSMELCECSSLDSLDYEISSVISLVQTTSSLNILLGKNS

SEQ ID NO: 283729 - protein, 162 aa, Glycine max
  Clone ID: PAT_MRT3847_98230C.1.pep
MLHFSQNKDGNQGEADTIPTPVVIIDQDSDPDATVVEITFGDRLGALLDTMNALKNLGLNVVKANVFLDSSGKHNKFSITKADSGRKVEDPELLEAIQAIRLTIINNLIQYHPESSSRLALGAAFGLLPPKEQVMNVYTFQFQFQNMNFSLLLVTCRQVLSS

SEQ ID NO: 283730 - protein, 138 aa, Glycine max
  Clone ID: PAT_MRT3847_98231C.1.pep
MAVAMAACSLGLHLSADNTLRPFEKTTILKALSISDATKPCYISHKTRLSSSSSGITMIPRATTVIGTVEDGNQGEADTIPTPVVIIDQDSDPDATVVEITFGDRLGALLDTMNALKNLGLNVVKANVFLDSSGKHNK

SEQ ID NO: 283731 - protein, 56 aa, Glycine max
  Clone ID: PAT_MRT3847_98232C.1.pep
FLPCPSSFRLNTFFFLTSNSTGKVIPLNLPSQHYLLHLPLQQGSLSPILPIPLAYS

SEQ ID NO: 283732 - protein, 262 aa, Glycine max
  Clone ID: PAT_MRT3847_98233C.1.pep
HASAGGSGRNVIDNGKNDSDGNCKDFGVCLEKVISSNSDNVGMIKCSPVHVDGDFDDVVVDDEEEDEEIDVEMEKGSFDVKEISVPESKVVNEPERKEVVNVPAKQKIVNEPEPKKVVTTNRQFHQKNERPVSIPIAVKPSPPIRKLSTIHQNFSKADSIPKAEEYYCFPQSQNKLQSLVDLIMWREVSRSAFIFGIGTFAIVLSSYAKDINLSLISVMSYIGLVYLAVIFLYRSLICRGVIDVEDTNYVLREEEAIWVLKL

SEQ ID NO: 283733 - protein, 309 aa, Glycine max
  Clone ID: PAT_MRT3847_98234C.1.pep
QQCKDLNISSDSIKKSPIQARKKRSGVGESFEKNAGKLRKNKSDLIKNVGDGDAGNAIQPRKGKSELDHVLDESRNDGLAGGSARVVILNGKNDCDENCKDFGVCLEKVISSNSGNVGMIKCSPVHVDDDDEDDVVEEEVDDEEIDIEMEKGSFDVKEISVPESKVVNETERKEVVNVAAKQKIVNEPEPKKVVSTNRQFHQKNERPVSVPISVKPSLPIRKLSLLHRLSGLYDSIPKAEEYCSFPQSQNKLQSLVDLIMWRDISRSAFIFGIGTFAIVLSSYAKDINLRLEISTLQRVQFILYIHFAT

SEQ ID NO: 283734 - protein, 67 aa, Glycine max
  Clone ID: PAT_MRT3847_98235C.1.pep
FRVRFKLILVLCSFLCHIVLFKLVIFWISAPILLSVYRTSWVDLSTSLRALTLVVSLIRIAGQSGLM

SEQ ID NO: 283735 - protein, 40 aa, Glycine max
  Clone ID: PAT_MRT3847_98236C.1.pep
PTRPASMTRYLESRKFEFFTSKKKKNRKFEFIFNKLSFFQ

SEQ ID NO: 283736 - protein, 114 aa, Glycine max
  unsure (1)..(114): unsure at all Xaa locations
  Clone ID: PAT_MRT3847_98237C.1.pep
LEKQRDDGVAGRQPERVSGKLRKLTTLPTIDEXERKKLQKTLSMWARQTNRMTHTIPTIQGYVRKDDNVWRSVXHPGSKXATQTNRAQMFEXPITNTPTVYQCMNGGETRRTHR

SEQ ID NO: 283737 - protein, 173 aa, Glycine max
  Clone ID: PAT_MRT3847_98238C.1.pep
HRWPAILRQRDIFRKLFENFEPSSVAQFTDKKLLTLKINGNSLLSEPKIRAIVENAKQLPKVQQEFGSFSNYCWRFVNHKPIRNEFRYGRQVPVKTPKAEVISKDMMRRGFQCVGPTVVYSFMQVAGLVNDHLLTCFRYHECKVTTKTEFKTEVKENNDTSEMTINNDRRSFN

SEQ ID NO: 283738 - protein, 80 aa, Glycine max
  unsure (1)..(80): unsure at all Xaa locations
  Clone ID: PAT_MRT3847_98239C.1.pep
CTEGINGQRPTELNTXGGCXNPGTGLKTDQFCCTAGGCGPTDYSRFFKPRXPDAHRYPKDDPTRTFTCNGGTDYRDEFCP

SEQ ID NO: 283739 - protein, 86 aa, Glycine max
  Clone ID: PAT_MRT3847_9823C.1.pep
ACLVPISALFLHLSFTSFRIISCSRFKHHQSWCRDHPPCLGLWKRALYSLNHSTCPIPNPYRVVHSGLSCNLAARLQKRPLCCVVL

SEQ ID NO: 283740 - protein, 93 aa, Glycine max
  unsure (1)..(93): unsure at all Xaa locations
  Clone ID: PAT_MRT3847_98240C.1.pep
NPYSPTFLSYHYQVPXFYIVFILTLHSPSHIIPYISHNFILIYLSSHHNLQPTLIYISPTHLYSTTHFTTIIFIIKTYLCILQTTFIHTYFLF

SEQ ID NO: 283741 - protein, 530 aa, Glycine max
  unsure (1)..(530): unsure at all Xaa locations
  Clone ID: PAT_MRT3847_98241C.1.pep
AIADIIKSRTEALLKKTKTAVSPKPIVMRAEYAHCPNLTIIDTPGFVLKAKKGEPENTPDEILSMVKSLASPPHRILLFLQQSSVEWCSSLWLDSIREIDPAFRRTVIVVSKFDNRLKEFSDRWEVDRYLSASGYLGDNTHPFFVALPKDKGNVSNDEFRRQISQVDSEVLHHLREGVKGGFNEEKFKSSIGFGRLRDYLESELQKKYKEATPATLALLEQRCNELTSELARMDSKIQANSDVSHLRKFAMLQAASISNHVGALIDGAADPSPELWGKTTVEERSRSGIGVWPGITADVNPPNATLRLYGGAAFERVLHEFRCAAYSIECPSVSREKVANILLAHTGRGGGRGITEAAAEIARAAAKSWLAPLLDTACDRLSFVLGSLFDLALERNCSHDSECGIKGDDMDGYVGFHAALRCAYNRFIGDLAKKCKQLVRHHLDSVASPYSQVCYFNDFQPCSGPNALSYSKVLELSDTSSASRDVRRDQENIXPPEKNAQETTPGKTGETRDVLRGKSHNYPLRPHLPE

SEQ ID NO: 283742 - protein, 85 aa, Glycine max
  unsure (1)..(85): unsure at all Xaa locations
  Clone ID: PAT_MRT3847_98242C.1.pep
MGLKNRGVGHRAWSLLRASLLWARKGGLLRRRVAMELRLVPKYLKRLGHTAPPPSHIHYFERELSFDKTPIFHVKMYRQTXMRFH

SEQ ID NO: 283743 - protein, 67 aa, Glycine max
  Clone ID: PAT_MRT3847_98243C.1.pep
MAGMSTRQGGKAEPLKKRRSDKKEYDEIDVADIQKKKEDENALNELKAMGQQKGSVGGSGLKKSGEK

SEQ ID NO: 283744 - protein, 61 aa, Glycine max
  Clone ID: PAT_MRT3847_98244C.1.pep
RRASGQWAELLGLAGFIRPYASAGARDIFYGVNYASAASGIRDETGQQLGSRISLRGQVQN

SEQ ID NO: 283745 - protein, 59 aa, Glycine max
  Clone ID: PAT_MRT3847_98245C.1.pep
WNFAYLNVDRSLLIILPDDMTQSRLMLPISVLNSYLSLTGFFGNIYGLLHRWRIKKMHL

SEQ ID NO: 283746 - protein, 35 aa, Glycine max
  Clone ID: PAT_MRT3847_98246C.1.pep
HPQRKQEPTREDVTDERKSESTSAIINASELPHHV

SEQ ID NO: 283747 - protein, 67 aa, Glycine max
  Clone ID: PAT_MRT3847_98247C.1.pep
CVEIAHTSHMITTIKRGVEIFRIGKAYSRGRGVPNFLYGIEQAKQGEKTRMAHHAEDSGFSEDLAVA

SEQ ID NO: 283748 - protein, 112 aa, Glycine max
  Clone ID: PAT_MRT3847_98248C.1.pep
TLISLSVALCNSFLSLLSYLASLSLVRRRRKPCSGCETHGDDTNGSDLSVSETEERAAWRNPLLTEINPSRNRGTTVHHHRQHLRALCETISHYRPQTEWKLYLACGGDWHR

SEQ ID NO: 283749 - protein, 62 aa, Glycine max
  Clone ID: PAT_MRT3847_98249C.1.pep
PPQTLVNLTCAIFSISTLSLILANRGSHHLNTSTMHLDNSHSSVPFTHQFSSHHKDCLSFLP

SEQ ID NO: 283750 - protein, 72 aa, Glycine max
  Clone ID: PAT_MRT3847_9824C.1.pep
PKRGQFGVFPNQGPFAPPVNKGILKKGFFKAHWFPRAFLGGFAKIPHIGPPVLVNHAEKGSAFVPQKAHQSF

SEQ ID NO: 283751 - protein, 67 aa, Glycine max
  Clone ID: PAT_MRT3847_98250C.1.pep
TMPSIAFSGGEEPAGVGLESLQGLVYQTPRRRSDAQVSRMFAQAPINKRATELLGEHICCPSKKYRP

SEQ ID NO: 283752 - protein, 144 aa, Glycine max
  Clone ID: PAT_MRT3847_98251C.1.pep
MMRRRTQLLVKATNHVERTPKDRHLRKILYGTTVGRTTADVADSMHAIARRLAKTRNWTAALKTLIVIHTMSREGEPTLTEELLNFSQRGRIRQPSNFKDESSPIAWDRSDWVRTDALYLEDRLQSFQVLNYDIETDRLAKPVA

SEQ ID NO: 283753 - protein, 89 aa, Glycine max
  Clone ID: PAT_MRT3847_98252C.1.pep
HIIFTWCLRACQHIQSAHARLKSKMIFHYWHFFQKPNPMNALITFTLLPFVFLLFIIKVYFNLPLPIRLTPSTYEILSIKTPIQKHHPS

SEQ ID NO: 283754 - protein, 258 aa, Glycine max
  unsure (1)..(258): unsure at all Xaa locations
  Clone ID: PAT_MRT3847_98253C.1.pep
TTLTFTTAAHTDKDNLVCLQSKPFKLAFENQDNPVREIKPKNRRIMGAGGPDDEDNNRWPPWLKPLLKESFFVQCKLHADSHKSECNMYCLDCMNGALCSLCLAYHKDHRAIQIRRSSYHDVIRVNEIQKVLDIXGFQTYIINSARVVFLNERPQXPRPGKGVTNTCEVCERSLPLIPYRFCSLGCKIVGTSRNFQKKKSAAMVSDTEDSWSSNSSHGKKEQLQHLPHRPPTSVNYRTAKRRKGIPHRAPMGGLVIEY

SEQ ID NO: 283755 - protein, 207 aa, Glycine max
  Clone ID: PAT_MRT3847_98254C.1.pep
PGIRLETISLSRIKQLLPPPSPTRTHSLSHRPQNLTLLPSLFSSLLPPKQVNKQHSHIHHNTNTNTNKDNNLVCLQSKPFKLAFENQDTPVREIKPKNRRIMGAGGPDDEDNRWPPWLKPLLKESFFVQCKLHADSHKSECNMYCLDCMNGALCSLCLAYHKDHRAIQIRRSSYHDVIRVNEIQNVLDITGVQTYIINSARVVFLNE

SEQ ID NO: 283756 - protein, 139 aa, Glycine max
  Clone ID: PAT_MRT3847_98255C.1.pep
AEGFVRLNGILFTRTSLEILTEVLSLVSAGLRELLSSGQDEELNFGTDTLENKLAIVRIVSIIIFTVHNVNKESEGQTYAEIVQRAVLLQNAFTAAFELMSLVVERCMQLWDPSCSYLLPGILVFVEWLACYSYLAAGN

SEQ ID NO: 283757 - protein, 30 aa, Glycine max
  Clone ID: PAT_MRT3847_98256C.1.pep
YFFFFDFIILKIILTLLFIKQPNLILLSPL

SEQ ID NO: 283758 - protein, 88 aa, Glycine max
  Clone ID: PAT_MRT3847_98257C.1.pep
KSFFFFFFFFFFFLLKTRGPVLGTNTSWGSEKQKHKATMLCKKIKRIPSLKGCLKGKKERSQASHLFWGGGKPPYLVYSGASSRFLDH

SEQ ID NO: 283759 - protein, 53 aa, Glycine max
  Clone ID: PAT_MRT3847_98258C.1.pep
SAVNPTNNLKFKTTSSSINLHSFLTRTINHPHNFQWHEINTNQHRLRPRKQRS

SEQ ID NO: 283760 - protein, 199 aa, Glycine max
  Clone ID: PAT_MRT3847_98259C.1.pep
SFCCEKTTEGYGCEKTTEGYGCEKTTEGYGCEKTTEGRTRGTENVKKEEGRRKYRGVRQRPWGKWAAEIRDPFKAARVWLGTFETVEAAARAYDEAALRFRGSKAKLNFPENVTLRQPQFTVSTSTDPFQLSGTNLYDHRMFLTSNTMASHHLQSSLPLPPATSSSLTSPPQNITSLSSLYSAQLPPWSASGHSSSSSP

SEQ ID NO: 283761 - protein, 103 aa, Glycine max
  Clone ID: PAT_MRT3847_9825C.1.pep
CSLAHNHNSVRESQYKYTDVISCRSVKKYLPSFPSSSYRYWPSKPADSNFPINKDLTCVAYDLFHDELVISYEVGSTLNNNPHLEVAKHESKTFWGLRMNGNV

SEQ ID NO: 283762 - protein, 52 aa, Glycine max
  Clone ID: PAT_MRT3847_98260C.1.pep
FAATYAYLHQSFNDPRGKIPHTQPFPIQTDDAGNCYVTSTPLLRHHLLQKSR

SEQ ID NO: 283763 - protein, 69 aa, Glycine max
  Clone ID: PAT_MRT3847_98261C.1.pep
CSFSLRTLLNDQVQTGEKLNTSCHSRIWYWTSWVDWAIAVHDPTLCSSLSHIAAQRGRNRKTLERRCKC

SEQ ID NO: 283764 - protein, 134 aa, Glycine max
  Clone ID: PAT_MRT3847_98262C.1.pep
NGISIGEPTALDWLYVHPQGMEKILTYLKHRYNNIPMFITENGIGMRENSNHATKEIINDVERVEYLRGYLDSLATAIRKGADVRGYFVWSLLDNFEWTDGYSIRHKTSAYSRVTNNGMIYSLLSRKKISSHFL

SEQ ID NO: 283765 - protein, 49 aa, Glycine max
  Clone ID: PAT_MRT3847_98263C.1.pep
NDKSFTNGDVNTYLRFKGLGCTPPVLMFVQIFCHIVSITGFESPFDLKE

SEQ ID NO: 283766 - protein, 527 aa, Glycine max
  unsure (1)..(527): unsure at all Xaa locations
  Clone ID: PAT_MRT3847_98264C.1.pep
GGRELPLLAHHALFALSFCISIFLASCDDDFLSVKKNSSSSPFPSNFLFGTASSSYQFEGAYLTDGKGLNNWDVFTHKPGTIMDGTNGDVAVDHYHRYQEDVDLMDYIGVNSYRFSLSWARILPKGRFGKVNWAGIDYYNQLVDTIVSKEIEPFVTMSHYDIPLELEERYGGWLSPEIQEDFKYYANICFKNFGDRVKYWVTFRLENVATIRGYRTGMWPPSRCSGSFGNCSYGGDSEREPFIAASNLLLSHAVAVDLYRTKYQKKQGGKIGVVMNXLWFEPVSNSWKDKLAAERAQSFYMNWFLDPIIIGEYPAEMHEILGQDLPTFGSSDVEKLKSGLDFIGVNHYTSAFAKDCIFSACEQGRGSSRTEGFTLRSPQMNGISIGEPTALDWLYVHPQGMEKILTYLKHRYNNIPMFITENGIGMRENSNHATKEIINDVERVEYLRGYLDSLATAIRKGADVRGYFVWSLLDNFEWTDGYSIRFGLHHVDYATLNRTPRMSAFWYKNFIALHAPRAGTRPQHTQE

SEQ ID NO: 283767 - protein, 103 aa, Glycine max
  Clone ID: PAT_MRT3847_98265C.1.pep
KKKPPFKNPSIKKRGGKGKPNLINQKTWPKKKKKRPILTGGTLKRNQKGFTKQTQGFFFFFHQTTPQKNIFFFCPRKEKKKDLQSFSLKRLLHPRRAFKKGIF

SEQ ID NO: 283768 - protein, 92 aa, Glycine max
  unsure (1)..(92): unsure at all Xaa locations
  Clone ID: PAT_MRT3847_98266C.1.pep
SVPKISSDLIAERILVDKTGEGITLIHHGTISSLKRVAACMKGXAMAKIAMIMNTAHAMSYCASYVQVDLTTGNCTETSDACKWPKSAPHDW

SEQ ID NO: 283769 - protein, 69 aa, Glycine max
  Clone ID: PAT_MRT3847_98267C.1.pep
VVGAKKSSLYKLASLYSERFHVSCSNPLPNKAETANNGVLRQRVREPSIARWLQRFGPVRVFTSSKFSL

SEQ ID NO: 283770 - protein, 54 aa, Glycine max
  Clone ID: PAT_MRT3847_98268C.1.pep
SSRLAAGEGVNNVGALLVTCRRAKLAGELRLKEVGSDHMDCCVEEKVLQVEQNL

SEQ ID NO: 283771 - protein, 81 aa, Glycine max
  Clone ID: PAT_MRT3847_98269C.1.pep
HSARDFPSAPTRLYICTILSKLYNMDWHMAHMTCRCRIPRSIMSMALLQLRVFLFICQIRITSRLVCSISIYELCAQSAVS

SEQ ID NO: 283772 - protein, 74 aa, Glycine max
  Clone ID: PAT_MRT3847_9826C.1.pep
WALHKWKCMRNFLQGCNNVIHACLPMLPPLIMILYLYTDAVVLGRQSIRHTLQHKSMSFPINHLEDPTLSCILY

SEQ ID NO: 283773 - protein, 47 aa, Glycine max
  Clone ID: PAT_MRT3847_98270C.1.pep
GPTQTSIQASDSGKKTIEWEISTFTYFGGKYSCSSGRSPSLLLRVDH

SEQ ID NO: 283774 - protein, 226 aa, Glycine max
  Clone ID: PAT_MRT3847_98271C.1.pep
SHHSPRRHLLSHPLRQFLSCLPPPSLAAIVRSYGAVKALVAALEKQTMMAKENTVCALVRLSKNKEEDKVMIGRVGAILHLLKLLEGGGLHGKKNSVTVRYALCSTTKENKVKAVSTGVMRALVELMVDLGLSMEDLGLSMVYLVSVVVAVAEAKGIYDFQLQALVAEVRDLRDREHSATEQHHLLVQVFDSLQLGQVSSSRSVVLFVFSCWFSLPRLRVEAEAER

SEQ ID NO: 283775 - protein, 354 aa, Glycine max
  Clone ID: PAT_MRT3847_98272C.1.pep
MDSQMTKLGTSLLVPSVHELAKQPMTKVPERYVRLNQDPVVSDTISLPQVPVIDLNKLFSEDGTEVEKLNQACKEWGFFQLINHGVNPLLVQNVKIGVQEFFGLQMEEKRKLWQKQGELEGYGQMFVVSEEQKLEWADIFYINTLPSCARNPHIFASNPQPFRNDLESYSLELGKLSIAIIKLISKALEINTNELLELFEDLSQSMRMNCYPPCPQPEHVIGLNPHSDAGALTILLQVNEMEGLQIRKDGMWIPIKPLSNAFVINVGDILEILTNGIYRSVEHRATINAEKERISIATFHRPQMNRIVGPTPSLVTPERPALFKRIGVADYYRGYFSRELRGKSYIDVIKIKNT

SEQ ID NO: 283776 - protein, 51 aa, Glycine max
  unsure (1)..(51): unsure at all Xaa locations
  Clone ID: PAT_MRT3847_98273C.1.pep
KRISYKECVLNNVNTLVDRHQXISYGISLYILLVELLKARTFLTSQANFLD

SEQ ID NO: 283777 - protein, 58 aa, Glycine max
  Clone ID: PAT_MRT3847_98274C.1.pep
IQPFPWEETRSRGDTDPGFQPFTHEPDHDLSVPLEGSSPAKGEGPYANRSMLWVEEFE

SEQ ID NO: 283778 - protein, 99 aa, Glycine max
  unsure (1)..(99): unsure at all Xaa locations
  Clone ID: PAT_MRT3847_98275C.1.pep
DTSIHGFPXIIXXXRXVXLSQTPDCVPXLPXXLLNKTXISFLXXQQILXLLQFSALLCLRGRHRMGLGRWQNHFHVVDEXELLLXILKSRLGDALRLED

SEQ ID NO: 283779 - protein, 63 aa, Glycine max
  Clone ID: PAT_MRT3847_98276C.1.pep
VILLWNLGTACPSLRNTFDNESEGLGLPGSRLWLIEIYVLTIVMKVAVERASISVPSIAGDIN

SEQ ID NO: 283780 - protein, 241 aa, Glycine max
  Clone ID: PAT_MRT3847_98277C.1.pep
ILGAFLGFWFSLVTSIKHPFDSFLACVRFNSFLWQPCQSNKTVTVLYVSFKRHPLQHINQRFSLPSLEPNRLEVIQHHPPQIENVYCSLSAHEVMNSNPGHYVALVVSSPTLKAENGAPMKQLKLLRPDDTLHIGQVYRLISFEDVLKEFASKKCGKLGKLLKETGSHGIQMKHKDSRATNPSPNSKTEFGSIKVEQEIQRMGNHGSSSSNNNNNKGVGRHFVGSGGQWRPALQSIAEIGT

SEQ ID NO: 283781 - protein, 91 aa, Glycine max
  Clone ID: PAT_MRT3847_98278C.1.pep
GENHQWGENTHKRGRPPKNRARPEKKKSVKKTRGGGTRSFSLKFHCRITFQRRGATYQRRGPWHQGLTEGQKNPIKPPNPGKDPKRPPKSN

SEQ ID NO: 283782 - protein, 65 aa, Glycine max
  Clone ID: PAT_MRT3847_98279C.1.pep
RPTRFRLYHPSDRTHIRIPERQGHKSQSLASSTLTLVTPFGAHPGSKTMKRHSPDGICQRPKDPI

SEQ ID NO: 283783 - protein, 100 aa, Glycine max
  Clone ID: PAT_MRT3847_9827C.1.pep
LSSVILPKANAPKAEMESLLWLYHMLAPFCNAIYCERGLSRLRRVILLALLLNTSQFNVYNVLSLKFSYGVSATGFCNRISYTAHAGDEHKCACLYPDFF

SEQ ID NO: 283784 - protein, 99 aa, Glycine max
  Clone ID: PAT_MRT3847_98280C.1.pep
RALPLQSAANTRCTHDSRAPAVDAGFLRAAQSAIFRAGRSPLTRLLIVSGCPLALPRRQGSPSFSPVVVRCLPCSLFPEGAPAPQLTVKILVSTIPLEP

SEQ ID NO: 283785 - protein, 160 aa, Glycine max
  unsure (1)..(160): unsure at all Xaa locations
  Clone ID: PAT_MRT3847_98281C.1.pep
FIDLPYTGXGMDVSFSGILSYIEATAAEKLRNNECTPADLCYSLQETLFAMLVEITERAMAHCDTKDVLIVGGVGCNERLQEMMRIMCSERGGRLFATDDRYCIDNGAMIAYTGLLEFAHGASTPLEDSTFTQRFRTDEVKAIWREANLENLNGLAEKSI

SEQ ID NO: 283786 - protein, 99 aa, Glycine max
  unsure (1)..(99): unsure at all Xaa locations
  Clone ID: PAT_MRT3847_98282C.1.pep
XXAMAMXXXXXYRSXKXXTXQSQRADLXXWXLKXSXXXTXFXAXXEHILXXLWXHXXNXQXXCVXGXXAXTXXXXXNSVISXAHXXXXRXPLXNXPXXX

SEQ ID NO: 283787 - protein, 61 aa, Glycine max
  Clone ID: PAT_MRT3847_98283C.1.pep
PAKTKSPLVAFPQILKNRGPKPLLKGPGANILRAVPGAGVLPGYTNFQVFVFAKKNGSGGA

SEQ ID NO: 283788 - protein, 82 aa, Glycine max
  Clone ID: PAT_MRT3847_98284C.1.pep
QKIKALASTLLLALIGINNPSSYVAKESLGSYVPESYVISIDLYDTEFLDKDNTELIADDLYKYDSFTCACKCSPAFGTTAC

SEQ ID NO: 283789 - protein, 72 aa, Glycine max
  unsure (1)..(72): unsure at all Xaa locations
  Clone ID: PAT_MRT3847_98285C.1.pep
LXVXXLPPTVTPXXXFXVXEGAKIVDTXEAXLIIXASKLQXLEMQVHVWXXFXXLKXXNFQYTQNSFXEYLF

SEQ ID NO: 283790 - protein, 137 aa, Glycine max
  unsure (1)..(137): unsure at all Xaa locations
  Clone ID: PAT_MRT3847_98286C.1.pep
KRKKNCPLDEEKFEIFFLSIFSSIQFLSFCLLTHFLSSVTEGNAVTCNWGREGLPRNLGLSFICPSPFGRTGGLTRQMGGWVFHDLLNRDFGFCCLLLSLAHCRLDTGLAEKLFVGASLNFLALXFCCARFGRLSWG

SEQ ID NO: 283791 - protein, 189 aa, Glycine max
  Clone ID: PAT_MRT3847_98287C.1.pep
GSEQLSGVMPVSPAEDDITHSLINRDSFGHYNMGGIAEVLLALERIEQDAELTHEQILLLETNLFLNGLNFYDHHRGMRLDIDNMSYEELLALEERMGTVSTALPEEAFAECLKRSIYQSAYTHECCNEDKDDIKCCICQEEYVVGDEVGDLQCEHRFHVVCIQEWLRHKNWCPVCKVSAALSNSFLPH

SEQ ID NO: 283792 - protein, 72 aa, Glycine max
  Clone ID: PAT_MRT3847_98288C.1.pep
TVHCITAFEWHCCLVLCSHLERFSQSPLITKDASVGVGSSLDRLLPQLPPTGCATPLLVSPPAKESFSLWGK

SEQ ID NO: 283793 - protein, 360 aa, Glycine max
  unsure (1)..(360): unsure at all Xaa locations
  Clone ID: PAT_MRT3847_98289C.1.pep
MSNSNRRKEFSLMLAGPRDKAIPCNDIENTKLTISVSDSAVMGEKDAITLPRENMSSDSTWLLHVKEECHEQTGTVLTSTLVDLSCHMGLTSTESTRNIPAPSKVEASDHCLESLEVCPPNPQLSGIKVKTEDNHENLGGCATSNVADNARAVNGNISCAPNNYRQKGPRIAKVVRRINCNVEPLEFGVVLSGKSWCSSQAIFPKGFRSRVRYINVLDPSSMCYYISEIVDAGRGWPLFMVSLENCASEVFIHMSAARCWELIREKGNQEIAKQHKLGRKXAPPLQPVNGNFSCGINNYRQKAPVHAKDVRRINCNCNELEFSVVLSGKSWCDIQAIFPKGLRSRVLKVNVLVPTCLFKL

SEQ ID NO: 283794 - protein, 540 aa, Glycine max
  unsure (1)..(540): unsure at all Xaa locations
  Clone ID: PAT_MRT3847_9828C.1.pep
YYYYDYDDYAYYYFVDAADPDRIESRRPEQNFTILKELDIQQRXEDDIARVAAFLSIXRDSASILLRHYNXVLDKVHDAWYVDEYKVXITVGLFENPVCQNSNTRELTCGICFKYVSSXRVESTACGHTYCYSCWAGYFSTSINDGPGCLVLRYPDPSCSAAVGQDMINLLASDEDKQKINELLISYNHDNNKTTWCPAPGCGYHAIIFDGSGGNYDASFLXSYSFWKNCTEDAHRPDYGTVXSRFCKKDRDESENNNXILANSKCCPYKWPLDKNQGCRQMIFTPPPKXXFCWLLGASLANDEKSGGGYNCKHPQEAKKGEVQYEPRETRIISRNTLAKXVEXLDKTNSTQPSEPKLTIAVLKATQSVNRWSDWKMIEXKMMIRRKNTHKNLMEEPENAKKGLYNXLYCGRVSVIELLNLCTEKEILVPKCGDDPSREFNDFRTKLAGLTSVTRNYFENLVRALENGLSDVDSNGAAFSKATSSKNAAGSSKGRGGRGKATIRTISSRMTDDNHWSCEHCTYANXMSATTCQMCNQQRR

SEQ ID NO: 283795 - protein, 71 aa, Glycine max
  Clone ID: PAT_MRT3847_98290C.1.pep
CLTFLFCIGKANPNISSSPSAQLLLLPKFLLILRFRVSALWEAKMRKIHSKGWIGKPLVARCSKIRVLNLH

SEQ ID NO: 283796 - protein, 138 aa, Glycine max
  Clone ID: PAT_MRT3847_98291C.1.pep
MLSRALRLPRAVPMRTKLAAPTYTAIRSVTTDAASASLSHSVPKSDDEPFSVNLSDESFETYELDPPPYTLEVTKKELKDMYREMVITRQMEMAADRLYKEKKIRGFCHLSTGQEAVAVGIEHAITKEDDIITAYRCH

SEQ ID NO: 283797 - protein, 46 aa, Glycine max
  unsure (1)..(46): unsure at all Xaa locations
  Clone ID: PAT_MRT3847_98292C.1.pep
MGSFFXVLVFSQIETRKSASRFVAYLNGVWVGISLPFSLLRCLQLA

SEQ ID NO: 283798 - protein, 43 aa, Glycine max
  Clone ID: PAT_MRT3847_98293C.1.pep
YEQTDITCSILSQHLNSCMHTKSGSHAWESIFIINACNANHGS

SEQ ID NO: 283799 - protein, 308 aa, Glycine max
  Clone ID: PAT_MRT3847_98294C.1.pep
MADTNSVEVILDFLKRNRFTRAEAALRSELSNCSDLNGFLQKLTLDEKNLHDGLQNDKGKPVVENQGLDSRDSVEVSKELIVKEIECGTGTSNAAESKWKIVAPTGERNKSNEVVETSDKNFTFSKSSEDSVLDMYSWKFNASNGPVELYQNDGGSRPNNALKAPVSQQSKYQTSEALDATNSNVKSKEENNVPAEKTSLWIGSSGKASTEPKYDLMQSKEPRELDRQFKFNASSLKENLTDNVLSRTDENVNSSTDPWKDCSVKTVFPFSKGDMSTSYNGSTYSDRKEEKRRAENSDVRASIKEQVD

SEQ ID NO: 283800 - protein, 86 aa, Glycine max
  Clone ID: PAT_MRT3847_98295C.1.pep
TSLETAHKLANMGVGRRMKKQGPPEPLSEEHFANLKRKKGLPVDDTPTEVRSSKKRRTSAKPRSPPKSSVRTRARLLSHRSQRGNK

SEQ ID NO: 283801 - protein, 68 aa, Glycine max
  Clone ID: PAT_MRT3847_98296C.1.pep
PWALAKVAELKGTFWNLRTWSFSYKTPRRTRERPPALVKGWPNFYMALVAFIWSWDRLNTLFEPLFFE

SEQ ID NO: 283802 - protein, 32 aa, Glycine max
  Clone ID: PAT_MRT3847_98297C.1.pep
IALLTVHLRGKSLCWGNNVRRLVMDVISQCEW

SEQ ID NO: 283803 - protein, 52 aa, Glycine max
  Clone ID: PAT_MRT3847_98298C.1.pep
KKKYYILTKFFDMIEISYFSRIERRNLTGQPGLVKWVIKKHSWMKKKKKKKN

SEQ ID NO: 283804 - protein, 207 aa, Glycine max
  Clone ID: PAT_MRT3847_98299C.1.pep
MADYKQHHGRSCGCCCLFGILWKIVVALIVLVGLVFLIFWLVVQPRYFKFHVTEADLTQFEYYPNNNTLHYNMVLNFTARNPNKKLSIYYDKVEALAFYEDARFANYDVITHMNSFRQYKKSTSPMSAVFSGQKVLMLNNEQVSQFNQDKSVGTYDIYVKLNFRIRFRLGDSISRHLKPKVKCDLKVPLNKSGTFTLFQTTKCHVNV

SEQ ID NO: 283805 - protein, 205 aa, Glycine max
  Clone ID: PAT_MRT3847_9829C.1.pep
FPHIVDTIILLNTNLMFQEKMKRSRKSLASAFTLFCPQIAAGSRSTDLGSLSHVKVDVEVDGSRSCSWNPGGKHEAGYDAFMTGCIFAQLCSDLGIDFKLRDSSNQLALNEKLQKYVNRLYLSWIHGDIIDLNTGNKVADSSPRSLTKRYPKIMFENIVIIWGFSSKLKANEIRECISKVFGPTSVVSVFHLDATAAFVQFSKTE

SEQ ID NO: 283806 - protein, 154 aa, Glycine max
  Clone ID: PAT_MRT3847_982C.1.pep
HLDSSWIRKLSRSISRLAASPWYPYCHVTILYYCYCYLVLHRLTLRLQSYASPLRCAQATLQTLVDPCSCSSLHSHYACCTILKHQLALVYLTYRSGTGMVPAYTPQGTCPTINILTDSCPWERAHAQKTLPLCCCLLFIQLEPLKVWCRGLAY

SEQ ID NO: 283807 - protein, 78 aa, Glycine max
  unsure (1)..(78): unsure at all Xaa locations
  Clone ID: PAT_MRT3847_98300C.1.pep
VPKGSXHXXXLPEXKXXXXXRDXXLFXRXCRTSHFLEEEXLHLERATNXSTXGPIXSSALNAPGYQXAQXAXSXEXXS

SEQ ID NO: 283808 - protein, 37 aa, Glycine max
  unsure (1)..(37): unsure at all Xaa locations
  Clone ID: PAT_MRT3847_98301C.1.pep
XVSTNLSSSIQILKFLFSFFPLLVLHTCTKYESTHLS

SEQ ID NO: 283809 - protein, 272 aa, Glycine max
  Clone ID: PAT_MRT3847_98302C.1.pep
MSHSDTIPLHPSSQSDIDEIENLINASVHQSVPSARPPSPPRASIPVSVSAAPSPFISSNLPPPPPLPKSSVSAVPPPPPPPRADISSSGFGSAPNTLTEPVWDTVKRDLSRIVSNLKLVVFPNPFREDPGKALRDWDLWGPFFFIVFLGLTLSWSASVKKSEVFAVAFALLAAGAVILTLNVLLLGGHIIFFQSLSLLGYCLFPLDVGALICMLKDNVIVKVVVVCVTLAWSSWAAYPFMSSAVNPRRKALALYPVFLMYVSVGFLIIAID

SEQ ID NO: 283810 - protein, 132 aa, Glycine max
  Clone ID: PAT_MRT3847_98303C.1.pep
QPPPILSPPPPTNSSSPPPPPPPVLSPPPPPPVLSPPPPTNSSSPPPPPPPVLSPPPPPRSPRRSVCINIFPRPPTNSCCTLLADLIDLEAAVCLCAQIRTQLLEIPINIDIFLNLVLNSCSKRLPPNYRGN

SEQ ID NO: 283811 - protein, 75 aa, Glycine max
  Clone ID: PAT_MRT3847_98304C.1.pep
IYPYMYRTASLMKTGNVQGALAEINRILGFKLSLECLELRFFIYLALEDYKAAVRDVQAILTLCPSYKKKKKGRP

SEQ ID NO: 283812 - protein, 36 aa, Glycine max
  Clone ID: PAT_MRT3847_98305C.1.pep
NLYVLLKKWGIKVGKRHIIRSSFVKPLQIENLTDIN

SEQ ID NO: 283813 - protein, 83 aa, Glycine max
  Clone ID: PAT_MRT3847_98306C.1.pep
KDQAFQMNPAAPTSYLDPHLHLLKARGATTKQIYLGPTPAGDAHMVMQTTSSIISGGDSLTREGTQERSGSSPLFSSSNKDYL

SEQ ID NO: 283814 - protein, 45 aa, Glycine max
  Clone ID: PAT_MRT3847_98307C.1.pep
PWNVPDWFNFFHGDSKNLTSKWLIRTTNCKYWNVTAKDRDIITVD

SEQ ID NO: 283815 - protein, 64 aa, Glycine max
  Clone ID: PAT_MRT3847_98308C.1.pep
YSQLQKVEANVHIKASADQFHNVLCNRTHHIANIFPGKVQSVEIHKGEWGTEGSVISWNYLHGM

SEQ ID NO: 283816 - protein, 160 aa, Glycine max
  unsure (1)..(160): unsure at all Xaa locations
  Clone ID: PAT_MRT3847_98309C.1.pep
SKSEGSCLTLEVISGPSRGLRYSVESTNPSRLPLTLGRVSPSDLLMKDSEVSGKHAMINWNLDKWKWELVDMGSLNGTLLNSTPINHPDTGSQEXGDPMNLTNGDTITLGSTSEVMVHITSQTQHHIPFGLGMASDPLALHRRGKRFPMEKGYYYQWPST

SEQ ID NO: 283817 - protein, 54 aa, Glycine max
  unsure (1)..(54): unsure at all Xaa locations
  Clone ID: PAT_MRT3847_9830C.1.pep
LEXLDYRGIFLYNRLLFPRPRATVCRLTMAAICNSLLLKHRFSLSRAPPLSSFH

SEQ ID NO: 283818 - protein, 39 aa, Glycine max
  Clone ID: PAT_MRT3847_98310C.1.pep
TTIFLRYDNQKGIIPNNVPVAKAIYIYYLFAEMADAIES

SEQ ID NO: 283819 - protein, 146 aa, Glycine max
  Clone ID: PAT_MRT3847_98311C.1.pep
MEVYGKSMVAGPANVIFLSSILGQEGPVPGHKCDWKCQNEHVCGNMYRCKLTGLTHICDKNCNQRILYDNHSSLCRASGQIFPLSPAEEQAVRGVRRKLDAENSPSESCGFKRRRGDAQIHPSPFERSFSAVSPICSQVGDGMDMS

SEQ ID NO: 283820 - protein, 64 aa, Glycine max
  Clone ID: PAT_MRT3847_98312C.1.pep
KKKSGFFGNRFYKKFWFFHLWGGWGQNVNIKSLGLVIGNKLSFQPKAWFGFFFKQFLKGLPRPT

SEQ ID NO: 283821 - protein, 74 aa, Glycine max
  unsure (1)..(74): unsure at all Xaa locations
  Clone ID: PAT_MRT3847_98313C.1.pep
AFLXXXLGXRLGXLXCXXXXXCMXXATQXXXXXXSXGXXXXXXVXXQLLXDXHSWXXVXXXXLYXQFAXXSXNR

SEQ ID NO: 283822 - protein, 66 aa, Glycine max
  Clone ID: PAT_MRT3847_98314C.1.pep
LTIKCINSVHTTPPLTLISSTTAQITRYPHFWNTHKKIGTISKAAKLVNSIKELSNHQQKLYATID

SEQ ID NO: 283823 - protein, 42 aa, Glycine max
  Clone ID: PAT_MRT3847_98315C.1.pep
NVLARKLYTIFKTSAKKKNEKNLRTIMFLHPPCINSYQDYTL

SEQ ID NO: 283824 - protein, 129 aa, Glycine max
  unsure (1)..(129): unsure at all Xaa locations
  Clone ID: PAT_MRT3847_98316C.1.pep
GSSKDALDAEYFWTDPLRCDPESVPKYESSHEFQTKKKRVQLRPNEXNAKRLKMQHPLQHTRLPPIQQAGQQHPQMTARLSTLLLCQVTAVAVRRRHVYGKPLGPFVGPGTSPLGVNSWRESNHSNLAR

SEQ ID NO: 283825 - protein, 39 aa, Glycine max
  unsure (1)..(39): unsure at all Xaa locations
  Clone ID: PAT_MRT3847_98317C.1.pep
MLHLFFFYTPGFFFFFFFFFFFFFFFFFFFFFXXLKLTV

SEQ ID NO: 283826 - protein, 90 aa, Glycine max
  unsure (1)..(90): unsure at all Xaa locations
  Clone ID: PAT_MRT3847_98318C.1.pep
LXISXXPRAAAASFCXXDDDGXGXXIAFXXXXMGXXRVYXXGXSXXLRGETALXSXEAXEVADXXXLTKIGXWDHFXGRTETREEPNAIM

SEQ ID NO: 283827 - protein, 63 aa, Glycine max
  Clone ID: PAT_MRT3847_98319C.1.pep
KSIIFFVPTYAQKSLMFYVPHYDFYQMWVSCGARVMISASELGWKGGEMIFWRFKPLIFWVGT

SEQ ID NO: 283828 - protein, 64 aa, Glycine max
  Clone ID: PAT_MRT3847_9831C.1.pep
LCTYQMRFWRAIVLRSGAGFLAKANIARQRILPLPLINVMSPARVQAGGGRPGDSGAAPPGGAP

SEQ ID NO: 283829 - protein, 58 aa, Glycine max
  Clone ID: PAT_MRT3847_98320C.1.pep
VFLLAYVKLGPKKIFSNLKIFFPPPGFFFLGPFLFSFNFIPGLKKYNVPPSNKAIISA

SEQ ID NO: 283830 - protein, 69 aa, Glycine max
  Clone ID: PAT_MRT3847_98321C.1.pep
NSGMNKTGVCRKQIKGGIKRARFIRSLISDSEKRESFITSFCSVAERNYKRIKWSLLVVEVVFMHTHGQ

SEQ ID NO: 283831 - protein, 80 aa, Glycine max
  Clone ID: PAT_MRT3847_98322C.1.pep
KMYSNTLKISYLIKKLSFSLTFTLIYGKHLTTYFTNCPLHIKNFYEFNNSPYFKLLTCLESPNVLNSIFNILFIQHLQLL

SEQ ID NO: 283832 - protein, 77 aa, Glycine max
  Clone ID: PAT_MRT3847_98323C.1.pep
KSVLLLHFYFLMQKERPFRCYNLWAPLSFSQHNFTCSLIALSTQKATVRLTPHFSFRLTTISTVPSQQHLRLQCSLA

SEQ ID NO: 283833 - protein, 62 aa, Glycine max
  Clone ID: PAT_MRT3847_98324C.1.pep
AAEQIFMHEPIVLQLKAPVKVFGDLHGQFGDLMRLYDEYGFPSTAGDITPGIKALLAVSGVV

SEQ ID NO: 283834 - protein, 65 aa, Glycine max
  Clone ID: PAT_MRT3847_98325C.1.pep
YVKCIDMRLREELYMLVEDECVAMFRIILQHVQGSLAQLCGILYWYCNPSVVFYQKYGRVARPGN

SEQ ID NO: 283835 - protein, 40 aa, Glycine max
  Clone ID: PAT_MRT3847_98326C.1.pep
KKTILNRLLLFKLGKIAYKYSKLCLLQIDTSNFHLVPVNL

SEQ ID NO: 283836 - protein, 175 aa, Glycine max
  unsure (1)..(175): unsure at all Xaa locations
  Clone ID: PAT_MRT3847_98327C.1.pep
SLPAYPHEFDDVMNNSHTTLGTSCCIRTSKEVMIVSNAAFLLRNQIMQSLKKHLGREPYNEHLMDMLKQAQLLTAEEQMIDLMTSLXDRXDLSTYTLTLCQHIVQNKTAYSSFHRSVACALHMAGDDNDNHVTVTNIRAEIGTYLRVQDDYMDTGGDPQQLKRCAHILNMSCALV

SEQ ID NO: 283837 - protein, 93 aa, Glycine max
  Clone ID: PAT_MRT3847_98328C.1.pep
PSFLVIVFVGQAQAQLGLIAGFSRNGRRPVLRRRRVEEALLVQLRKGSVCGGVEVKGKDVTIFRDLGGMKNVKEELNMLLLPIYHPHVANLEP

SEQ ID NO: 283838 - protein, 87 aa, Glycine max
  unsure (1)..(87): unsure at all Xaa locations
  Clone ID: PAT_MRT3847_98329C.1.pep
CQRVRNSMVXSVPGSSLVXVRGWIVVVEIGRRRKGFAQGVECPCPCCCSSSPTSFRRSPMXKRGPPDXSLRHFSLSDPSNLAFQYYF

SEQ ID NO: 283839 - protein, 87 aa, Glycine max
  unsure (1)..(87): unsure at all Xaa locations
  Clone ID: PAT_MRT3847_9832C.1.pep
LRNTLELYTQELKNLAMVVVEKMGKALKMEETEMXRVFKDRMQTMRMNYYPPCPQPEKVFGLTSHSDAASEVEGLQIRPFCRLLAAV

SEQ ID NO: 283840 - protein, 99 aa, Glycine max
  unsure (1)..(99): unsure at all Xaa locations
  Clone ID: PAT_MRT3847_98330C.1.pep
ISKLSLINYFHSNLLNRWHGQGENLIRTTGRSHLGNITFIRGTYVKEQKWGSLYGRLPPPTTXATIHLLASWMIIRSNLLLYNMWNMLNASSKKLQKLT

SEQ ID NO: 283841 - protein, 156 aa, Glycine max
  Clone ID: PAT_MRT3847_98331C.1.pep
EERQGQGQVVTCSGAYKDGSLRVVRNGIGINEQASVELQGIKGMWSLRSSTDDPFDTFLVVSFISETRILAMNLEDELEETEIEGFCSQVQTLFCHDAVHNQLVQVTSSSVRLVSSTTRDLLNEWHAPSGYSVNVSTANATQVLLGTSRVHLVYLE

SEQ ID NO: 283842 - protein, 70 aa, Glycine max
  Clone ID: PAT_MRT3847_98332C.1.pep
LRTKALTHCGFNNSLLDSFTSNITKHYSKPFSTLTLCPHLGWHCCLVNGDGEHKQRAMAPYREYERRRSR

SEQ ID NO: 283843 - protein, 46 aa, Glycine max
  unsure (1)..(46): unsure at all Xaa locations
  Clone ID: PAT_MRT3847_98333C.1.pep
CILXPPLXISCVGXCNXVXXNYGLICNLMXHXKFXXINRQCXXXSS

SEQ ID NO: 283844 - protein, 65 aa, Glycine max
  unsure (1)..(65): unsure at all Xaa locations
  Clone ID: PAT_MRT3847_98334C.1.pep
KNKLNIFFXGGLKPSQITLEKIKTQFVGVKNRHKLQETNYKKVQETPLALSLTAPHHSPPGKSTN

SEQ ID NO: 283845 - protein, 124 aa, Glycine max
  unsure (1)..(124): unsure at all Xaa locations
  Clone ID: PAT_MRT3847_98335C.1.pep
LSRLCXSXWAPPWXGXXGLSLFXLXFXXCXXLCVXXFLXXXXPLSXXXXLLWLXXXXGXXXXLLWXXPPPPGXXXCVXAXXXXXCVFXFRXXLAXRVFPCPFCXXXLXXFPCXXXCXXXPPPPP

SEQ ID NO: 283846 - protein, 218 aa, Glycine max
  unsure (1)..(218): unsure at all Xaa locations
  Clone ID: PAT_MRT3847_98336C.1.pep
DEEPDDGAAPLHHEDCVKHRYVPSGAALSIIRASIGGQQTIADRAKVAMHGYLNRFLGNLDIVNSQEVCRFLEVCTLSFLQEYGPKLKEGYVMVKHLSNISQDSDLSCXLGLDYMECFNSFNLETVVCTQVWSVLKPXFLAFLDDPFNNKPLDIMIFDILPYSNGDGGTKIFLADPVKERNPLRYTFKVTSGNRSIFVRTTSSAKVKAWVTAINEASL

SEQ ID NO: 283847 - protein, 144 aa, Glycine max
  Clone ID: PAT_MRT3847_98337C.1.pep
KLYRKGTVHPSPSPSPPTISDHVWVLPAGRLGLTLSLSPKDQEVLAYLISCSSSSSSTTNFSGNHRRNPKVVVDGDHPPVFNCSCFRCYMSYWVRWNSSPNHQLIHEIIDTFEDSLAHTTKPSRKDKRNKRGSKTKPFELTRSE

SEQ ID NO: 283848 - protein, 92 aa, Glycine max
  unsure (1)..(92): unsure at all Xaa locations
  Clone ID: PAT_MRT3847_98338C.1.pep
LKPDPELANLIHSMGMVLNNWYGLMRDLLCVVEYVXGYNDMGELEPYIXKLRHYGGXDVPLMTLDYGSSEGWIGTNVKPTVTHEFGTYTVLS

SEQ ID NO: 283849 - protein, 390 aa, Glycine max
  Clone ID: PAT_MRT3847_98339C.1.pep
QVGLGDTSGGDSPNDHYCWMRPEDMDYDRPVTECHSCSDLAAEMAAALASASIVFKDNKAYSKKLVHGATTLFKFSRDQRGRYSAGSSEASIFYNSTSYWDEYVWGGAWMYFATGNSSYLKLATAPGLAKHAGAFWGGPDYGVLSWDNKLAGAQVLLSRLRLFLSPGYPYEEILKTFHNQTSIIMCSYLPVFTSFNRTKGGLIQLNHGRPQPLQYVVNAAFLAALYSDYLDAADTPGWYCGPNFFSTDVLRNFAKTQIDYILGNNPRKMSYVVGFGNHYPKHVHHRGASIPKNKIKYSCKGGWKWRDTSKPNPNTIVGAMVAGPDKHDGFHDVRTNYNYTEPTLAGNAGLVAALVALSGDKSTSIDKNTIFSAVPPMFPTPPPPPAPWKP

SEQ ID NO: 283850 - protein, 48 aa, Glycine max
  Clone ID: PAT_MRT3847_9833C.1.pep
VTNPLGLPGKAANRLQFKVEGPIFLPPTIESWQGLRTPGHYSARMGSK

SEQ ID NO: 283851 - protein, 618 aa, Glycine max
  Clone ID: PAT_MRT3847_98340C.1.pep
MYSRDSWGGPLEINATDSATEDERSRNLQDVDRAALSRPLDETQQSWLLGPGEQKKKKYVDLGCIIVSRKIFKWTLGTLLFAAFLAGLIALIVNTVPRHRHKHPPPDNYTLALHKALMFFNAQRSGKLPKHNNVSWRGNSGMQDGKSSDHSAAIKDLVGGYYDAGDAIKFNFPASFSITMLSWSVIEYSAKYEAAGELEHVKEIIKWGTDYFLKSFNSTADTITTLAAQVGLGDTSGGDSPNDHYCWMRPEDMDYDRPVTECHSCSDLAAEMAAALASASIVFKDNKAYSKKLVHGATTLFKFSREQRGRYSAGSSEASIFYNSTSYWDEYVWGGAWMYFATGNSSYLKLATAPGLAKHAGAFWGGPDYGVLSWDNKLAGAQVLLSRLRLFLSPGYPYEEILRTFHNQTSIIMCSYLPVFTSFNRTKGGLIQLNHGRPQPLQYVVNAAFLAALYSDYLDAADTPGWYCGPNFFSTDVLRSFAKSQIDYILGNNPRKMSYVVGFGNHYPKHVHHRGASVPKNKIKYSCKGGWKWRDTSKPNPNTIVGAMVAGPDKHDGFHDVRTNYNYTEPTLAGNAGLVAALVALSGDKGTSIDKNTIFSAVPPMFPTPPPPPAPWKP

SEQ ID NO: 283852 - protein, 240 aa, Glycine max
  unsure (1)..(240): unsure at all Xaa locations
  Clone ID: PAT_MRT3847_98341C.1.pep
IDASEVLSVIFDCLHRSFICGSSVSDAESAESNCMGSWDXANGSCIAHSLFGLNIFEQMNCYHCGPESRHMKYTHFFHNINASALRTMKDTFAESSFDKLLNLVEMNHQLACDLEAGGCGKLNHMHHFFSTPPHVFMTVLGWQNTCESANDITETLAALSTNIDISVLYPGLDPKCIHNLVSKVCYYGQHYHCFAYSHDHEQWIMYDDKTVKVIGGWADVLTMCERGHLQPQVLFFEAVN

SEQ ID NO: 283853 - protein, 78 aa, Glycine max
  Clone ID: PAT_MRT3847_98342C.1.pep
VCSVEIHKRWIMTSHRILENMELSPIYYGSIQGISHGKTSSLQCCSLSVVKHIRYHHAQASFSAIASRFDYRFNGTTL

SEQ ID NO: 283854 - protein, 95 aa, Glycine max
  unsure (1)..(95): unsure at all Xaa locations
  Clone ID: PAT_MRT3847_98343C.1.pep
PRVRRYIKILKGYTKNLHHPEASIVERYIAEEAIEFCSEYIEKAKPIGLPKFQHDDRVDSKGSRGLHVITPSVEDLLHAHLYVLXYSNEVLPYIL

SEQ ID NO: 283855 - protein, 73 aa, Glycine max
  Clone ID: PAT_MRT3847_98344C.1.pep
VMINHVKTEIDNSLECATTNKISDRSQKVFTQNHYKLRRSLPNNSFNLQGRNPVEGRNTNTRSSSAERGLMKY

SEQ ID NO: 283856 - protein, 131 aa, Glycine max
  Clone ID: PAT_MRT3847_98345C.1.pep
KQRPTRPLETERDLAAKSSQESRTAIGTLKEAFEAVTREKSEIQSRNSALETKIGYLETELKQLNDYTRKEEEITRAKILELEGNLGIAMQKEEEMKMEISALLKEKKEVEMNVEMLTEEKDGVREALSVV

SEQ ID NO: 283857 - protein, 82 aa, Glycine max
  unsure (1)..(82): unsure at all Xaa locations
  Clone ID: PAT_MRT3847_98346C.1.pep
GGRGSGRVPLVMGVTEVVYVTVIGDSASSLEXESADRAEESEGRHNGRYHXLPERAPEYGGTVIDDDHFHRVKEGRRKVNKT

SEQ ID NO: 283858 - protein, 53 aa, Glycine max
  Clone ID: PAT_MRT3847_98347C.1.pep
LQARLKVYRLARNFVLLMKSTSYIDFSHNTIWQLRFTLWVRKTASSSSFTVPK

SEQ ID NO: 283859 - protein, 75 aa, Glycine max
  Clone ID: PAT_MRT3847_98348C.1.pep
KLACGKREIERERRNKKKKETPPYIPKGPNKLALLSTLSKKACYLSTRLFKQTKGLQHPAREVSIVVVVPPSLIA

SEQ ID NO: 283860 - protein, 173 aa, Glycine max
  unsure (1)..(173): unsure at all Xaa locations
  Clone ID: PAT_MRT3847_98349C.1.pep
IKTSKPVKGKEAFSLGLVDGLMSPDDLVNTACQWALDIMGRRRPWIASLYKTDKLEPLGEAREILKFARAQVQKRAPNLQHPLVCIDVIEAGVVAGPRAGLWKEVEASEGLIKSDTSKSLIHVFFSQRGTSKVPWVTDCGLVPRHVKKVAIIGGRLMGSGXATAFILNSYPII

SEQ ID NO: 283861 - protein, 67 aa, Glycine max
  Clone ID: PAT_MRT3847_9834C.1.pep
TLIPLKLTIFPSPPHFWPLNPSFPSRGNLKQPCSYTTLELPLYPFIWACFFWGMPHLDKDFKLFLEQ

SEQ ID NO: 283862 - protein, 66 aa, Glycine max
  Clone ID: PAT_MRT3847_98350C.1.pep
RACETYLSRGGGARWRERLGSCLIPLIECVVKVWWCISTSTSFPATLQCTLVLFFLEAHKYIFYFL

SEQ ID NO: 283863 - protein, 117 aa, Glycine max
  Clone ID: PAT_MRT3847_98351C.1.pep
MAEEGQVIGVHSVEEWKEHLKKGEESKKLIVVDFTASWCGPCRFIAPILAEFAKKLPNVTFLKVDVDELETVSKEWGIEAMPTFLFLKEGKLVDKVVGAKKEELRLTIAKHAAIAAA

SEQ ID NO: 283864 - protein, 67 aa, Glycine max
  Clone ID: PAT_MRT3847_98352C.1.pep
PGKNYRRNIYKKVNRGNIQPYLGPKVKNKKTLLCLFKVFLFPIPQWGAFFGGPRNNHWPGRPHPIGK

SEQ ID NO: 283865 - protein, 138 aa, Glycine max
  Clone ID: PAT_MRT3847_98353C.1.pep
IRLGTKMASGTFNFERSLRQLEQRRRRKHLQATTRGSHNWAQFDRYQVPVYPLHSYPQSTYQYQVNSQSRNVPSEFFYHNRGLIPNMTGYPPSRLRVGEFTSLSQHPVSNDIRHACTNLYDFEMKNYGWRKYGIGCEL

SEQ ID NO: 283866 - protein, 110 aa, Glycine max
  Clone ID: PAT_MRT3847_98354C.1.pep
SNVIASGGLGGEVFIWDIEAALASATKCNDPMDDDDNSNDINVSGNSLPMTSLRNISSSSSISMHTTQSKGYNPIVAKGHKESVYALAMNEGGTLLVSGGTEKVVRIWDP

SEQ ID NO: 283867 - protein, 71 aa, Glycine max
  Clone ID: PAT_MRT3847_98355C.1.pep
GLWAFGSLLGVPNPNSPLVPNIAPMCKANKAQYEPTVCTWTPKYPLGLSRAPLRGARKRPNHNLLKTWISL

SEQ ID NO: 283868 - protein, 371 aa, Glycine max
  unsure (1)..(371): unsure at all Xaa locations
  Clone ID: PAT_MRT3847_98356C.1.pep
DNLDVVSCSVCQMGVLIRHPHKCNACQGYCHEGCSTRSTVSANEVEYLTTCKQCYHARLLAQKENTNESPTSPLLLQGRENNSGTFLNGSRPKSHDQVLKSSRTKANNPNVKQVTPVTALKXTKAKYYEQEPTSTRTKDNNHFGTPQVASEATLTGKKPRKNCSWGIIWQKKNNEDTDNDFWLRNILLKGGSNMPQLKPVCHLCRKPYMSDLTYICCETCRNWYHAEAVELEESKISSVLGFKCCKCRRIKSPVCPYSDLKPKRQEGKKSRTRTKKKEHSGADSDSGAIYYDMRDCEVATPVFHVEDDPSHVFPVEGDPTHVFPXRDDPLLFSLSSVELLTEPKMEGDVEWNSVPGPGLRKLPVRRNVSIE

SEQ ID NO: 283869 - protein, 88 aa, Glycine max
  Clone ID: PAT_MRT3847_98357C.1.pep
TPRLIQSSKPRELIQPIVTTYNYFFIYFLIFFLLLLFLLLFFLHACFFLLVFLLLNILQHTAIEFSDMDFGLQLKPGSGPQQWRGYSH

SEQ ID NO: 283870 - protein, 205 aa, Glycine max
  Clone ID: PAT_MRT3847_98358C.1.pep
MEESSTTCVLCEKRAMMLCDSDQAKLCWECDEKVHSANFLVAKHSRVLLCRLCHSPTPWKASGMKLTPTVSFCNRCVAERNARWNRLVNNENEHQQQQQQQQQSDFVVDDGREYGSDHVFDDDDGDYSDDSGEEEEEDEDDEEENENQVVPMSSGSATSPPKVACLALKRLRNNSFLSILHMMRQRALHLRCLVLHCLVVMNHPL

SEQ ID NO: 283871 - protein, 51 aa, Glycine max
  Clone ID: PAT_MRT3847_98359C.1.pep
LQHKLPTGAYGSHFTRVQSHRPYGPSPRLFICLNSAGSPGFVLVVALIQTR

SEQ ID NO: 283872 - protein, 101 aa, Glycine max
  Clone ID: PAT_MRT3847_9835C.1.pep
LTVSYNKLTVILAVLQLTALYLTNSYLSCPTTGSSLTLPRVFSNIHLSPSTFPSIVCLRGNGYGTVGARIKGRNGSWSILGPWAGRKQTPQSVCNHIHFCF

SEQ ID NO: 283873 - protein, 100 aa, Glycine max
  Clone ID: PAT_MRT3847_98360C.1.pep
IKPGQTNTRQCSIRGTDAAWRHQLTTPYRGQAHESPDCHPIHALDRMDGDAKRVPRNQSDLADTIAPARLGDHRPPSPTAKISVAQPENTTEPESNRGIR

SEQ ID NO: 283874 - protein, 189 aa, Glycine max
  Clone ID: PAT_MRT3847_98361C.1.pep
GLRVAKDIAENNPGSRVLIATSETTIIGFKPPSADRPYDLVGVALFGDGAGAMIIGSDPILESEKPLFELHTAVQEFLPHTEKKIDGRLTEEGISFKLARELPQIIEDNVEGFCDKLISVVGFENKEYNKMFWAVHPGGPAILNRVEKRLDLLPEKLSASRRALMDYGNASSNTIVYVLEYMIEGRSPD

SEQ ID NO: 283875 - protein, 127 aa, Glycine max
  unsure (1)..(127): unsure at all Xaa locations
  Clone ID: PAT_MRT3847_98362C.1.pep
RERTITIRDCLXHFETTNYYCTLIDAPGHTDFINNIITXHFQHNCAALIINSTTGGLQSGISKKGQTRXHTLLXITLCVKHIILCXNTNYSSSPNYFKVNYDEIINKVYFSFNKXHINPDKITFVPI

SEQ ID NO: 283876 - protein, 40 aa, Glycine max
  Clone ID: PAT_MRT3847_98363C.1.pep
CFKSESSGYNHLTECYVSHPYNFQCWYGVIYLICKYIIIL

SEQ ID NO: 283877 - protein, 79 aa, Glycine max
  unsure (1)..(79): unsure at all Xaa locations
  Clone ID: PAT_MRT3847_98364C.1.pep
FQLQXXSQXQXTDSSXNXMRRQGGXXPLVXXPKTGEETXXGWQAGFRXCAPXXXLXXXRXTPCLSAXTTKLVRXXRCHT

SEQ ID NO: 283878 - protein, 23 aa, Glycine max
  Clone ID: PAT_MRT3847_98365C.1.pep
STFDYYISGGLVFTCDFAKTHCL

SEQ ID NO: 283879 - protein, 54 aa, Glycine max
  Clone ID: PAT_MRT3847_98367C.1.pep
WKQINKIPFSDNDQIFPMSMYKFSPTQTRENTQIMLSQPYKTFHLQLWPSKIIK

SEQ ID NO: 283880 - protein, 26 aa, Glycine max
  Clone ID: PAT_MRT3847_98368C.1.pep
ISYIQHNLLLYSFMILFNDHSKHYSI

SEQ ID NO: 283881 - protein, 84 aa, Glycine max
  Clone ID: PAT_MRT3847_98369C.1.pep
ITRSYTFYLYIIILANHLLMSDQTIDRSHTSFISRLFLTISGPILNEHNVETVTPFTILSLTLLTFCASITSHQLHTLFYNTLL

SEQ ID NO: 283882 - protein, 40 aa, Glycine max
  Clone ID: PAT_MRT3847_9836C.1.pep
TRFKAEFPVYDKVDANSNKSTPLYKCLKSNKGRLFGDGNK

SEQ ID NO: 283883 - protein, 54 aa, Glycine max
  Clone ID: PAT_MRT3847_98370C.1.pep
KLEQETGWFCAAFVLSLGLGALGTRWTSSIHLLQSSANSDPKIWRLFFFLLKTP

SEQ ID NO: 283884 - protein, 162 aa, Glycine max
  unsure (1)..(162): unsure at all Xaa locations
  Clone ID: PAT_MRT3847_98371C.1.pep
LEHHLEADHKTTILCRLKLGESVTTISTIGGSYKTTXALGLMLTDWDVGGQDKMRPLWRHYLQNTYGLIFVGDSMDRDRVDLQLWKSRGSLERWITGTRHNACDSMQTLAFQAALWLWMNPPEKYLPLCHRCLWCILRTXATCAVGLYEGLDWLSNNIALWG

SEQ ID NO: 283885 - protein, 50 aa, Glycine max
  Clone ID: PAT_MRT3847_98372C.1.pep
EWLLCLTPWSLNVTNYICSVPAHLNKKNCFVLIINWPPPHLFLCPRKKVW

SEQ ID NO: 283886 - protein, 43 aa, Glycine max
  Clone ID: PAT_MRT3847_98373C.1.pep
ICHIMISPRKLQLSKSFKTELLVSSDLSNFQWDKCHRESFGYL

SEQ ID NO: 283887 - protein, 75 aa, Glycine max
  Clone ID: PAT_MRT3847_98374C.1.pep
DLKHHPFKDCTVSHVKDPSIMFRHTMDPVPRLFTDLGFVLPRRDFHCVETWACNSKQITDSCRSLDQSSKPLTSS

SEQ ID NO: 283888 - protein, 74 aa, Glycine max
  Clone ID: PAT_MRT3847_98375C.1.pep
LGTLYETDQLCVLGDIFDLRFIIISDRFPSSPTVYELKDSYYSASRSIFIAMPPSSGDVSPHPIEKETYNFAQD

SEQ ID NO: 283889 - protein, 138 aa, Glycine max
  Clone ID: PAT_MRT3847_98376C.1.pep
KLVLTLLTGCQDHEQLCEWAYTEWMEGRAVNVVDKRIDGVVNAEELERALRISFWWCLQMDERRRPSMEEVVRVLDGTLNVDPPPQPCLAQAVTRRRFTRKWSRISDFSSVYACSIFRDLFSFVSLFQSPSCSTCIVE

SEQ ID NO: 283890 - protein, 56 aa, Glycine max
  Clone ID: PAT_MRT3847_98377C.1.pep
KLILFHVNNDANCNKSHALKKKQGYSTRSQLYTLMKTKQPLWLCTQLSSHSTALWP

SEQ ID NO: 283891 - protein, 73 aa, Glycine max
  Clone ID: PAT_MRT3847_98378C.1.pep
VFQTSTNQPGNFPPHRGRWSLLGKASFKSPPSLEWTHRVTRLSLAVGYVQENVFESPLFQIKGIYVSMSDFSE

SEQ ID NO: 283892 - protein, 73 aa, Glycine max
  Clone ID: PAT_MRT3847_9837C.1.pep
FEKPAQDLVLQPIHCLYPVVSESLGHVGAYNGLLTHHRPLSSLTGAHHYSSSEQAVYHNVPNAPRQAVGPIKL

SEQ ID NO: 283893 - protein, 94 aa, Glycine max
  unsure (1)..(94): unsure at all Xaa locations
  Clone ID: PAT_MRT3847_98381C.1.pep
TGGNNNGRGSCATADRATGQXAGNGAGANPPATGGEITGAANGGQDTHDGSNEEGNNFFLCETPQGGSGDCLSPPRPKNRKPEGPGELRAKGKE

SEQ ID NO: 283894 - protein, 46 aa, Glycine max
  unsure (1)..(46): unsure at all Xaa locations
  Clone ID: PAT_MRT3847_98382C.1.pep
KDFEVVNIMFALLSKTITFLRNIIFWECXFTYVILTKIFWWESWEI

SEQ ID NO: 283895 - protein, 48 aa, Glycine max
  Clone ID: PAT_MRT3847_98383C.1.pep
GSREFFISGGDGLPRGVVENQVARVRHVIKLHGYEVGSPISHVWYWIS

SEQ ID NO: 283896 - protein, 71 aa, Glycine max
  Clone ID: PAT_MRT3847_98384C.1.pep
NNLLFFYTLHIYHCVIYNFHDLPNPSIFYLIINHATTNIKHDCITRPIILLLQSLIALILDSLLPIITHIS

SEQ ID NO: 283897 - protein, 71 aa, Glycine max
  Clone ID: PAT_MRT3847_98385C.1.pep
LGTRPHPHINLNYVGCTSSSIPSIPFAAPLLPVAARLPLYLQGLLLTASYWMPPNSDSFLWLAQSLSCATA

SEQ ID NO: 283898 - protein, 45 aa, Glycine max
  Clone ID: PAT_MRT3847_98386C.1.pep
IIKMRIRIGKNLIMLTEYILIQYIAILYKAPPKKIHTPTMLQDFQ

SEQ ID NO: 283899 - protein, 109 aa, Glycine max
  Clone ID: PAT_MRT3847_98387C.1.pep
MYCRTEQWFLFLIRSLLLQFHAFQSSMIMGRKFFVGGNWNCNGTTDEVKKIVNTLDEAKVAEEDVVHVVVSPPFVYLPFVNSLLHPDFHVTAQNCWVRKCGTYTGDVIA

SEQ ID NO: 283900 - protein, 69 aa, Glycine max
  Clone ID: PAT_MRT3847_98388C.1.pep
YPHPTHTRCDIINAWGGATKFSGLKPVLGSTGPPLSTAYPTSQSPTTRCIGPRRTNETVGQLTEQHSSH

SEQ ID NO: 283901 - protein, 123 aa, Glycine max
  unsure (1)..(123): unsure at all Xaa locations
  Clone ID: PAT_MRT3847_98389C.1.pep
LRLDPLETAAXXXFIFLFFFGKEXPNTPGPLYKKKRPTSLYTHFFIHTQNIYKKHPPPTYSFNKIIFFFPTTIFKQKPKQNFYSFKQKKNIHSFNKKKTISNPKDNFNFTTHILYITQRQNLL

SEQ ID NO: 283902 - protein, 48 aa, Glycine max
  Clone ID: PAT_MRT3847_9838C.1.pep
KFGGHKGLLLHRGEPKISGPFSKAPKGGEALPIKTGALFGKLFFPPFY

SEQ ID NO: 283903 - protein, 76 aa, Glycine max
  unsure (1)..(76): unsure at all Xaa locations
  Clone ID: PAT_MRT3847_98390C.1.pep
SHASGVKSIKFDEKAVXALNTGCLSINRKGFCGTKISSVNPYTVLEGSIFKGVTGAFLKASSARNITRGASVAPFE

SEQ ID NO: 283904 - protein, 79 aa, Glycine max
  Clone ID: PAT_MRT3847_98391C.1.pep
KLNPHQMGFRFHQHILLGILFVALILTSGGLTTGQFIPGYTCVAKCINSPDCKQSCISHDFKIDSKCLNFFNINLCCCK

SEQ ID NO: 283905 - protein, 43 aa, Glycine max
  Clone ID: PAT_MRT3847_98392C.1.pep
PINLRPVHIQRCPHAECDFTYTPTPKQPIRHMVIVIINKARPN

SEQ ID NO: 283906 - protein, 64 aa, Glycine max
  Clone ID: PAT_MRT3847_98393C.1.pep
QFQKAGFLNQQNFRFFFPKRCSGMPIKFNRDPQMGVGKVRFLKRKLNFVHPLFIFINQNWFPPT

SEQ ID NO: 283907 - protein, 358 aa, Glycine max
  unsure (1)..(358): unsure at all Xaa locations
  Clone ID: PAT_MRT3847_98394C.1.pep
MLLWSTQSRLAQSLLRFQTSLAHRHSFRHHSDMASEGGNKSFARRDRLREIESKVQKWWEEKDVFRAEPGEKPPSSPGEKFFGNFPFPYMNGYLHLGHAFSLSKLEFAAAYHRLCGANVLLPFAFHCTGMPIKASADKLTREIQRFGDPPVFPSEVEEQQQQQQQQQQEQEEPPSGDGAPPDKFKGKKSKAASKSTGQVYQWEIMRSVGISDAEISKFQDPYKWLSYFPPLAVEDLKAFGLGCDWRRSFVTTDMNPYFDSFVRWQMRKLKSMGKVVKDVRYTVFSPLDGQPCADHDRASGEGVQPQEYTIIKMELVAPFPXKFKAWEGKKVFLAAATXRPETMYGQTNAWVLPDGEYG

SEQ ID NO: 283908 - protein, 205 aa, Glycine max
  Clone ID: PAT_MRT3847_98395C.1.pep
MASEGGNKSFARRDRLREIESNVQKWWEEKDVFRAEPGEKPPSPGEKFFGNFPFPYMNGYLHLGHAFSLSKLEFSAAFHRLRGANVLLPFAFHCTGMPIKASADKLTREIQRFGDPPVFPSSEIEEEPQQQQQEQDEPSSGDGAPPDKFKSKKSKAASKSTGQAYQWEIMRSVGISDAEISKFQDPYKWLSYFPPLAVEDLKAFG

SEQ ID NO: 283909 - protein, 166 aa, Glycine max
  Clone ID: PAT_MRT3847_98396C.1.pep
GVIFRHGGTLILYRGRNYNPKKRPVIPVMLWKPHEPVYPRLIKTTIDGLSIKETKEMRKRGLSVPALTKLAKNGYYAFLVPMVRDAFLSCELVRIDCEGLERKDYKKIGCKLRDMVPCILVTFENEQIVVWRGKDYKHPKDGYFLKDRESFDDDDDFCVGKEQQAM

SEQ ID NO: 283910 - protein, 31 aa, Glycine max
  Clone ID: PAT_MRT3847_98397C.1.pep
ALEDIPALFYDEDRNEIYTGNRHGLVHVWSN

SEQ ID NO: 283911 - protein, 48 aa, Glycine max
  Clone ID: PAT_MRT3847_98398C.1.pep
GTKPELFFFKKRGPHHLFCFTPTFFPKILNRVKNKAQGGPGLRGSLPV

SEQ ID NO: 283912 - protein, 84 aa, Glycine max
  Clone ID: PAT_MRT3847_98399C.1.pep
KDSKQSEIGSNLVLLGCCRREESKCTSPIAILQLPKGQVPFTCLPSGLRLCWRLSFCPSRTPGPRLPGSFRGCRPRGFGKEVLM

SEQ ID NO: 283913 - protein, 690 aa, Glycine max
  unsure (1)..(690): unsure at all Xaa locations
  Clone ID: PAT_MRT3847_9839C.1.pep
MNKIFAMSEEEIMSDQAKVIMKKSTNFCWPSIQDLNAAAHKEKCGWCFTCKGENEDRDCLFNSVVKPIWEVPNNTLVGLQPRKIQNGRLRDIICLIFSLEVRLRGLLLGPWLNLHQTDLWHKDLLKASDFLPVKRLLLLLESNLRLLALSADWLKHVDSVATMGSATHIVVSSSRTSSRHGIGRKRARNSDIETSSSSNTASGLGMYWWRGGRLSRXLFNCKALPHSLVTKAARQGGCRKIPGILYPENSDFARRSRFVAWRAAVEMSTSAEQLALQVRELYSNIRWHDIENNYSPYVLDKESRKSVRLFKKSIVRRKCTEGGSVKFPIDFGKRRAIPDVVIKHGSLLEQSASERKKYWLEESYVPLHLLKNFEEKRIVRKSTDKKLGKILEIGRVTRNSSTKGFSYLFXRLERSDCHQCGHCNKDVAMRDAVRCLHCKGYFHKRHVRKSSGTRTTGSSYSCHRCQDGLQAKTNTNKRKVDSKLQKIQAKKRKIVPSVCKSLNLKGNKKASSNNKIRQVRSRNSKNIPSSIPLRRSTRKAKSLYMHSQLNGGHKKGKKNVGRKKGKQGKTKKVIPQKSKETTGQYKKSEVTTARKKRTKICNSYWLNGLQLSRKPNDERVMLFKEKKRVASSKDFSGSLDHPKCCLCCGNECTLNYIACEICGDWFHGDAFGLNVENARQLIGFKCHVLS

SEQ ID NO: 283914 - protein, 45 aa, Glycine max
  Clone ID: PAT_MRT3847_983C.1.pep
IQTNSLFSSQRHKQNTDLNCRQILPIETGSTPGPCPGATKSPARN

SEQ ID NO: 283915 - protein, 296 aa, Glycine max
  Clone ID: PAT_MRT3847_98400C.1.pep
MARRSSSESEDDARKRSGSESEDEERYRYRRRGAENGKKSSGHRDDGHSGEERSGAKRNGGIRGDRKSTSRDRKEESESSEEEGQIVNKEGVREEKGEDERLRRGGREDEGDGWGNDQGERRGKKESHRLHHGDRWRGGEEDRWRFKDCHPHSDSKEEDHRELARKSERDRDRDRKRKVERGGDNERDRHACHDSDEEDDREFARKSERGRDRDRRRRVEKDGDNERNHREKDVSRRQKENGKKNDRNGRMVEDANPRRGTIPGGNLNGDVSNLGKSGGVYIPPFKMPMMMKEVQD

SEQ ID NO: 283916 - protein, 65 aa, Glycine max
  Clone ID: PAT_MRT3847_98401C.1.pep
PTTKFWIISGVQRTYHFLYKPFDYLLLTKKEELANMLRKLIELNIIVARRDSLRHTDTTGESAHV

SEQ ID NO: 283917 - protein, 227 aa, Glycine max
  Clone ID: PAT_MRT3847_98402C.1.pep
EWSRIKDVSWNLTEDKTGVMDILKLSYNFLPGRLKPCFLYFGIYPEDYEISARQLIQYWIAEGFIQPQKTGIADTTEPEDVADFYLDELVDRSLVQVAKRRSDGGVKTCRIHDLLRDLCLSESKYDKFLEVCTNSNIFTVSNTNPRRMSFHWKPDSDVSETTFNKSCTRSMFIFGRDAKTYLVPILKNFKLARVLGCDMIQQVWSYSASRDLKRMIHLRYLRIEVEH

SEQ ID NO: 283918 - protein, 52 aa, Glycine max
  Clone ID: PAT_MRT3847_98403C.1.pep
GPNRALETSIGFGKKINGKKEILGIQVLKKIKGPKSPFQNKLFLATTLRDWY

SEQ ID NO: 283919 - protein, 77 aa, Glycine max
  unsure (1)..(77): unsure at all Xaa locations
  Clone ID: PAT_MRT3847_98404C.1.pep
LNLPMANGLILFHTXYPNPLSKHPLFYTSILPFIPYFPAFIFELHPLRHSIYPQSSTDNLLNLLRPYFLFPLTIMIT

SEQ ID NO: 283920 - protein, 198 aa, Glycine max
  Clone ID: PAT_MRT3847_98405C.1.pep
MAGVNPEAGGWKAYPSVMETALDSGDGRSHHNMSDDGSVAVPSSGQNKVIPSPTQFSILYKGKMCIYEGIPAEKVREIMLIASVSAKSAEMKSGIRLTSFIPKSPSSSQGNSTNLPSPQSVKSSIRRLQDEFPLARRQSLQRFLEKRRNRLANKSPHALTKNVVHNPDKGFSPDDTPDFGLLNLNFQRRDFSPVVLPL

SEQ ID NO: 283921 - protein, 229 aa, Glycine max
  Clone ID: PAT_MRT3847_98406C.1.pep
MAGVNPEDARHLLLSHTIQKKKVAFFYFFFPIMAGVNPEAGGWKAYPSVMETALGNSGDGRRHHNMSDDGSVMHFSATRSVAVPSSGQNKVVPSPTQFSILYKGKMCIYEGIPAEKVREIMLIASVSAKSAEMKSGIPLTSFIPKSPSSSQGNSTNLPSPQSVKSSIRRLQDEFPLARRQSLQRFLEKRINRLANRSPYALTKKVIHNIDNNFSPDDTPDFGSLNLNFL

SEQ ID NO: 283922 - protein, 223 aa, Glycine max
  Clone ID: PAT_MRT3847_98407C.1.pep
MKLDDGNGSKVSGAVEMRRIEPVTVPLVDLPEISEPSVLLSDSIRNVVYVSLPPLIHGRKWLLLYSTWRHGISLSTLYRRSMLWPGLSLLVVGDKKGAVFGCLVEAPLRSSSKKKYQGTNNTFVFTNISGHPVIYRPTGVNRFFTLCNTDYIAIGGGGHFALYLDGDLLNGSSSVSETYGNPCLANSQDFEVKEVELWGFVYASKNEEVLAMSKTEAPGICRF

SEQ ID NO: 283923 - protein, 72 aa, Glycine max
  Clone ID: PAT_MRT3847_98408C.1.pep
LWFWFLTPSAFVTSTGRLNGSSSVSETYGNPCLANSQDFEVKEVELWGFVYASKYEEVLAMSKTEAPGICRF

SEQ ID NO: 283924 - protein, 99 aa, Glycine max
  Clone ID: PAT_MRT3847_98409C.1.pep
FSSNLYISSNGACSLSILISSLRCLLALSTSRSLASFLHFSCSSCHLLSSLLSHFLKPSVPYTVSCFFCFSKFHNPTILLNCGELKSKCYHQDCPDPNQ

SEQ ID NO: 283925 - protein, 58 aa, Glycine max
  Clone ID: PAT_MRT3847_9840C.1.pep
IVDYWYNAIISWVALLLRPSSSLLSAIIIIHYRLNQVSPQSSKIDYPKQSSSSKSKNR

SEQ ID NO: 283926 - protein, 89 aa, Glycine max
  Clone ID: PAT_MRT3847_98410C.1.pep
LNGLVCKLVDQTHLIRRQNELGNCFVQLPFILVHPTFFVISNIIHGKSKWVRKAIPNELSSISLYLNGPTSTGSGLYEQQVKSTARCTQ

SEQ ID NO: 283927 - protein, 378 aa, Glycine max
  unsure (1)..(378): unsure at all Xaa locations
  Clone ID: PAT_MRT3847_98411C.1.pep
MGKRQSLRNKATHLVSVLLNPISDSDTSNPKTSKQHPPAPTPTPPSGQVGGSETNDEEGNRGLVDGPDTSSFTAFLYSLLSSSDTGDNANSRVQSDDNKSAAPDHNPLPDSSSLKENGGRKSLISRSKQSIGKAIRRIGGFRHQDRRDNVEMKLDDGHGSKVSGGVEMRRIEPVTVPLVDLPEISEPSVLLSDSIRNVLYVSLPPLIHGRKWLLLYSTWRHGISLSTLYRRSMLWPGLSLLVVGDKKGAVFGSLVEAPLRSSSKKKYQILYXGTNKTFVFTNISGQPVIYRPTGVNRFFTLCNTDYIAIGGGGHFALYLDGDLLNGSSSVSETYGNPCLANSQDFEVKEVELWGFVHASKYEEVLAMSKTEAPGVCRF

SEQ ID NO: 283928 - protein, 95 aa, Glycine max
  Clone ID: PAT_MRT3847_98412C.1.pep
SPLQLILCIADDNVLGMNSYVDSCSHAEHIIEEHVNLVYKRYKNTALSRIKLIMHDWANQSCDAALWLDSTRRSSYENDTHRLFDMRDSMYIETI

SEQ ID NO: 283929 - protein, 180 aa, Glycine max
  Clone ID: PAT_MRT3847_98413C.1.pep
MGQSVSSAAVASRRERDPGHLSVNTSKTRSTALITPMAGYSSGAGEDESENRRGEAVTDETTDYISDLPNECLASVFQFLSSADRNRCSLVCRRWLQIEGQSRHRLSLNADEDLFPAIPSLFSRFDSVTKLALKCDRRSVSISDDALVLISQRCPNLTRLKLRACRALTDAGMEAFAKNC

SEQ ID NO: 283930 - protein, 65 aa, Glycine max
  Clone ID: PAT_MRT3847_98414C.1.pep
INLLGLVTSPSFHTTEGCLMFDIDLLISNKYIYIFSPKKRKSNKYISYSLIYFDFILWKCWERKK

SEQ ID NO: 283931 - protein, 114 aa, Glycine max
  unsure (1)..(114): unsure at all Xaa locations
  Clone ID: PAT_MRT3847_98415C.1.pep
PRLRAKRGHAGSAGNKIRMSLGLAVARTVNCAHNTCSKNLYDLVVDEIRDRLKPVPADCVXDMGIATGRKGLRHIRKKALPVDIIRQRKFIGTTDXVFTSFQDHAGAITDPTGE

SEQ ID NO: 283932 - protein, 67 aa, Glycine max
  Clone ID: PAT_MRT3847_98416C.1.pep
HHCSFTLMMLASSIVIHYISQDLLLHVEHHHGSFVRIRRIKFARRAAQDFNIPFPTSHSSHGLQCLV

SEQ ID NO: 283933 - protein, 86 aa, Glycine max
  Clone ID: PAT_MRT3847_98417C.1.pep
KKGSLGFIAPLAIGFVVGANILEAGPFRGGSINPARSLGPTVVSENFPANWIYWVGPFIGEGLAGLIYEKVFIGSYGAVPPFKTSP

SEQ ID NO: 283934 - protein, 375 aa, Glycine max
  Clone ID: PAT_MRT3847_98418C.1.pep
EISWSLTNRRYTEKCVSYAESHDQAIVGDKTVAFLLMDEEMYSGMSSLVDASPIVERGIALQKMIHFITMALGGEGYLNFMGNEFGHPEWIDFPREGNGWSYEKCRRQWNLVDTDHLRYKFMNAFDRAMNLLDDKFSFLASTKQIVSSADDDDKVIVFERGDLIFVFNFHPENTYEGYKVGCDLPGKYRVALDSDAWEFGGRGRVGHDVDHFTSPEGIPGVPETNFNNRPNSFKVLSPARTCGPYYRVEESQEDDDNNSLVGVEETSAAADVAKIPDESASTESEDIKLDGVKETLAAADVAKIPDESAPLESEDSNLDVVKEPLAAANAEVTKISGELVSVETEGINLDKLEETIVAASVESEVVRDKPEDAAN

SEQ ID NO: 283935 - protein, 80 aa, Glycine max
  Clone ID: PAT_MRT3847_98419C.1.pep
HRQHEFLRSQSCFGDQQQIVECSFKDLLLHRSIRWCDDRFGGSGSQHEREFQKRCDQRRQLPLRIDILLRDDPYCHIGRL

SEQ ID NO: 283936 - protein, 435 aa, Glycine max
  unsure (1)..(435): unsure at all Xaa locations
  Clone ID: PAT_MRT3847_9841C.1.pep
MSAPSREEESKEEERDEEANRLLEEEEEAESSSEEGEKILVADLEFDRVDDGSVPPPFSWKKLWLFTGPGFLMSIAFLDPGNLEGDLQAGAIAGYSLLWLLMWATFMGLLIQLLSARVGVATGRHLAELCRDEYPNWARLVLWFMAELALIGADIQEVIGSAIAIQILSRGFFPLWAGVLITASDCFFFLFLENYGVRKLEAAFAVLIAVMGLSFAWMFGDAQPNRKELLMGILVPRLSSKTIRQAVGVVGCVIMPHNVFLHSALVQSRKVDPKKIGRVQEALNYYSIESAAALAVSFMINLFVTTVFAKGFYGTKQADSIGLVNAGQYLEEKYGGGVFPILYIWGIGLLAAGQSYTITGTYSCQFIMMGFLNLCFKTWXRALITRXFSIAPTIIVAIVFNKSEGSLDVLNEWINVLQSMQIPFALIPLLTLVSK

SEQ ID NO: 283937 - protein, 58 aa, Glycine max
  Clone ID: PAT_MRT3847_98420C.1.pep
TLNLSICLMDRIGQKQIIAKYNPSHSKTWLSSCCRESEAYGRSSGPNTQNCRRGCHRF

SEQ ID NO: 283938 - protein, 34 aa, Glycine max
  unsure (1)..(34): unsure at all Xaa locations
  Clone ID: PAT_MRT3847_98421C.1.pep
NAXWNLTREQVMRHIXLLQANXXFXXXFGMGPXS

SEQ ID NO: 283939 - protein, 103 aa, Glycine max
  unsure (1)..(103): unsure at all Xaa locations
  Clone ID: PAT_MRT3847_98422C.1.pep
KVPLPANFTFKLRDGNGIPNSXNKYKEDQKXVSWHATPFEERLEKALSEEKLLSERSCSSGKTSQFLGVEGEESDMAESNRLYTTAYACQFSSASHEPQKLSV

SEQ ID NO: 283940 - protein, 52 aa, Glycine max
  Clone ID: PAT_MRT3847_98423C.1.pep
TSKLQSHNAAEANRLAQRFFAHAQILLICPNSNRINLFKFAYPPCTRLSSTR

SEQ ID NO: 283941 - protein, 53 aa, Glycine max
  Clone ID: PAT_MRT3847_98424C.1.pep
GDRWEVRFTLALLYYRNSLSIPQESRPPPVARFLVDHIVWQTLHELPLVIPGP

SEQ ID NO: 283942 - protein, 94 aa, Glycine max
  Clone ID: PAT_MRT3847_98425C.1.pep
TWTPEKRKNYNLLDAVSRHTMPVFPKSWAAILLSFDNVGVWNLRSELAENRYLGQQLYISVLTPERSLRDEYNIPEYALLCGVVKGLPKPEPYH

SEQ ID NO: 283943 - protein, 54 aa, Glycine max
  Clone ID: PAT_MRT3847_98426C.1.pep
KKIFKKKKKKQKKGDKKRGGAVGLMTDMVADPNKFKAYSPMLAPLEEMQETMKY

SEQ ID NO: 283944 - protein, 45 aa, Glycine max
  Clone ID: PAT_MRT3847_98427C.1.pep
VIISVSGFVFSSAARLSIAEIMSINPLLECSTSNLLFRSAIGRVG

SEQ ID NO: 283945 - protein, 68 aa, Glycine max
  Clone ID: PAT_MRT3847_98428C.1.pep
SSSHFHAYSTCIPRFIPCASHFSLLRCVPTSEALPLCYVKSSISVRDQHGYALTRHPRRWKNQCFFST

SEQ ID NO: 283946 - protein, 875 aa, Glycine max
  unsure (1)..(875): unsure at all Xaa locations
  Clone ID: PAT_MRT3847_98429C.1.pep
MGMVYQQIHACPNDCMLYRHEFQEMSKCPVCGTSRYKVKDEEESNYDENSNKGPTAKILWYLPIIPRFKRLFANEDDAKDLTWHANGRISDGMVCHPADCSQWKKIDGLYPDFGNEPRNLRLGLASDGMNPYGTLSTQHSSWPVLLVIYNLPPWLCMKRKYMMLCMMISGPRQPGNDIDVYLSPLVEDLRKLWDEGVVVFDAFRKETFEMRAMLFCTINDFPAYGNLSGYSVKGHHACPICEENTSYIQLKHGRKTVYSRHRRFLTPNHPYRRLRKAFNGSQEHDIAPIPLTGEQVYQRVQHLNTVFGKTQKKDKSESCIWKKRSIFFDLPYWCDLDVRHCIDVMHVEKNVCDSVIGTLLNIQGKTKDGLNTRQDLADMGIRAQLHPRSDGKKIYLPPACHTLSKKEKISFCQCLRQVKVPQGYSSNIKSLVQLKELKLVGLKSHDCHVLMQQLLAVAIRDILPNKVRFTITHLCFFFHAICSKVIDPVMFDELENEAAIILCQLEMYFPPAFFDIMIHLIVHLVREIKCCGPVYLRWMYPIERYMKILKGYTKNLYRPEASIVKRYIAEEAIEFCSEYLEKAKAVGLPECRHDDRVGGKGSRGLQVITPSVEDLLQAHLYVLNNSNEFFPYIVKHEALVKQNNPKMSKNWALKKHNKTFCDWFKDTIFADENASETLRKLADGPKRNVITWQGYDINRYSFYTKAQDDKSTMQNSGVTLRAESQHFASVNDANPCVASIPYFGFIDEIWELNYVKFTVCVFKCKWVDSNTGVRTDDIGFTLVDLKKLGYHNDPFIMAEQARQVFYVQDPCDERWCVVLQGKTIGVNVEDXDSYMDTYVSPLTAQITPNIVGEEEVDDVHANRNDHDEGELINII

SEQ ID NO: 283947 - protein, 222 aa, Glycine max
  Clone ID: PAT_MRT3847_9842C.1.pep
HASGFHNFNPFGGNWVSKPPNPLSVPSLPNNLTDAPSSLPPNFAAISLPNPFRRRPKPKPKPEEPVEPGHYEQLARQVLWECENLPDHRHTPEVDKILADNDAAFGGNNDDSVFVLREDATEEEVRENAELVERLRSSPVVQFMARAEEILDKMNEMELKENERPYHKEDWEVWKNVPNVIGLDGRPMPRKAQKTREEADDKVWDFARQFFFGLWDFRQRPY

SEQ ID NO: 283948 - protein, 99 aa, Glycine max
  Clone ID: PAT_MRT3847_98430C.1.pep
QSFKARDRLLTGPSCCVRDSDFELENVNTPSLLCIREVLSELEKSKALGSWRLTFSPSMVFLRVRKRLVAKPVDPATATSKRMGHIQKKRNLSAVEFFN

SEQ ID NO: 283949 - protein, 110 aa, Glycine max
  Clone ID: PAT_MRT3847_98431C.1.pep
PPGEIPQQPSSDALFLVFPALVQPQSEAALPLGHLFPKLEPLSPPLLLILSEDYSHVCCLVLQPLKPMLLEPILPSDVLVSLHMVPQGAFLASEILVSSPLVFGMEPDEL

SEQ ID NO: 283950 - protein, 75 aa, Glycine max
  Clone ID: PAT_MRT3847_98432C.1.pep
FFAAMIFTLFSIFILQTFVISSNKQKFHFYYNNIKYLIISFNIYQFSLQFFRRFNHTQYHKPCMFFYQKFFNTFF

SEQ ID NO: 283951 - protein, 75 aa, Glycine max
  Clone ID: PAT_MRT3847_98433C.1.pep
LILILMIATTCIMGFRDQMSCEIFLQLLVPSNFIQLSKIKELYKELLCHVYFFITMGCDCLIGIWRLKYSFKEHK

SEQ ID NO: 283952 - protein, 452 aa, Glycine max
  unsure (1)..(452): unsure at all Xaa locations
  Clone ID: PAT_MRT3847_98434C.1.pep
MSTIVEEANTYTEIIERWPVFYYGMGHMLNDITAAFWFTYLLFFFTDIGLSPRNASVVMLSGLVCYVFVRIFDFARINRVGHLEIWHGAXSLVVAISFSSVFVCSLPCKLFSSKSGTFETLCYSMYAAILNVGWAATQFSHMSMVSCITLNSASRVALASXSNAYTMFANLCQYAGALIVFXLSMVIHMVIFKIIKDRVQFFEPLIHVSINTTFILHPKTPXLTEGGNGLVHARICCVYWFKRILYYQVALVYVLTRLVLNVSQAYLAFFVINDLQMAQSAKALVPALIYICSFVVSIALQEIAWTGRMLKAYYSAGCILWIFCGAVILLLTTNMSYVMYIVSVFIGIANALMMVTGVSMQNFLIGENLNGCAFVVGSLSFLDKISCGLALYVLQSNQNLSPQLQATTQFPFSVTRIGLGLVPAFCALVGVVVTCTMDFHNPSKSLTAPLLA

SEQ ID NO: 283953 - protein, 190 aa, Glycine max
  Clone ID: PAT_MRT3847_98435C.1.pep
ARNSARALLHFIYRDTLIDDEELFMSRSSFLPSVSESFAAKLLAAAEKYGLPRLKLMCESVLCKDISIDSVAYILALADRYRATELKSVCLQFSAENLVAVMQSDGFEYLKENCPLLQSELLKTVAGCEEEFSGEGKCRSVWAQFSDGGDTNDRSVRQQTWENGVERSQSLWVHLSDGVNNNDRSPGQEA

SEQ ID NO: 283954 - protein, 348 aa, Glycine max
  unsure (1)..(348): unsure at all Xaa locations
  Clone ID: PAT_MRT3847_98436C.1.pep
IRHQSRFLCLLCIAVKAKNLLNGESTKSKLWLVDLAGSERLAKTDVQGERLKEAQNINRSLSALGDVISALAAKSSHIPYRNSKLTHLLQDSLGGDSKTLMFVQISPSDQDVGETLSSLNFATRVRGVELGPVKKQIDTSEVQKMKAMLEKARSECRIKDESMRKLEENLQSLESKAKGKDQIYKNLQEKIQELEGQIELKRAMQNDSEKKISQLSAKLRGKEETCGTLQQKVKELEKKMKEQLQSESASFQQKVWDLEKKLEDQMQGSESESAILKDXIKELERKLKEQEQSSMSLLRQQMKELGDRYREREQQWQQTHSFVDAVKAATPDVCKSCMREECSEIETG

SEQ ID NO: 283955 - protein, 83 aa, Glycine max
  Clone ID: PAT_MRT3847_98437C.1.pep
FTAARRRQKGQSELLKTVAGCEEEFSGEGKCRSVWAQFSDGGDTNDRSVRQQTWENGVERSQSLWVHLSDGVNNNDRSPGQEA

SEQ ID NO: 283956 - protein, 140 aa, Glycine max
  unsure (1)..(140): unsure at all Xaa locations
  Clone ID: PAT_MRT3847_98438C.1.pep
MFVQISPLDQDVGESLSSLNFATRVRGVELGPVKKQIDTSEVQKMKAMLEKARSECRIKDESMRKLEESLQNLESKAKGKDHIYKNLQEKIKELEGQIELKXDAMHNDSEKQIFQLSDKLRGKEETCRSTLEDPRVKSSN

SEQ ID NO: 283957 - protein, 190 aa, Glycine max
  unsure (1)..(190): unsure at all Xaa locations
  Clone ID: PAT_MRT3847_98439C.1.pep
MHTASRSNGGGVLASRTSSRSVTETVNGSHKFVIKGYSLAKGIGVGKHIASETFTVGGYQWAIYFYPDGKNPEDNSAYVSVFIALASEGTDVRALFELTLLDQSGNGKHKVHSHFDRSLESGPYTLKYRGSMWGVXRFFKRAQLEASTFLKDDCLKXNCTGGXWWVSSIDCSQXNTIQVPESDIGAHFRD

SEQ ID NO: 283958 - protein, 100 aa, Glycine max
  unsure (1)..(100): unsure at all Xaa locations
  Clone ID: PAT_MRT3847_9843C.1.pep
MACEAYFLLGLRALVLGSTFKVTGELEAHTDSTVIDIALNRNRFPEGFIFGAGSYXYHLQGASHDGGRGPSLCKAFTHNYPGLIIDGSNGVRSIDSYHHY

SEQ ID NO: 283959 - protein, 31 aa, Glycine max
  Clone ID: PAT_MRT3847_98440C.1.pep
LHICIYYLEGARLTSRSSAMSPISYRAGKQH

SEQ ID NO: 283960 - protein, 48 aa, Glycine max
  Clone ID: PAT_MRT3847_98441C.1.pep
SGLSISCCFLFLSADPAFLCCVCLNQFEFVCVDLDLRGSDLAFYGIFL

SEQ ID NO: 283961 - protein, 434 aa, Glycine max
  Clone ID: PAT_MRT3847_98442C.1.pep
MHTASRSNGGGGGVLASRTSSRSVTETVNGSHKFVIKGYSLAKGIGVGKHIASETFTVGGYQWAIYFYPDGKNPEDNSAYVSVFIALASEGTDVRALFELTLLDQSGNGKHKVHSHFDRSLESGPYTLKYRGSMWGYKRFFKRAQLEASTFLKDDCLKINCTVGVVVSSIDCSKLNTIQVPESDIGAHFGMLLENEEGSDVTFSVGGERFHAHKLVLAARSTAFETEFFNGMEEDDHDVVVTDMEPKVFKALLHFIYRDTLIDDEELFMSRSSFLPSVSESFAAKLLAAAEKYGLPRLKLMCESVLCKDISIDSVAYILALADRYRATELKSVCLQFSAENLVAVMQSDGFEYLKENCPLLQSELLKTVAGCEEEFSGEGKCRSVWAQFSDGGDTNDRSVRQQTWENGVERSQSLWVHLSDGVNNNDRSPGQET

SEQ ID NO: 283962 - protein, 48 aa, Glycine max
  Clone ID: PAT_MRT3847_98443C.1.pep
THLPSVSLHHATAPPCQLATVPLPLISYYDRLFGVSFPIGAFLVCRSN

SEQ ID NO: 283963 - protein, 86 aa, Glycine max
  unsure (1)..(86): unsure at all Xaa locations
  Clone ID: PAT_MRT3847_98444C.1.pep
DPNMYMIITEGGEHELYAKDIEWTLLTGHSIEQTLQFGPNEMALASIKLAVMSSKALLAQIIHSSVPHSSWTMRXNFIEPDNHLLK

SEQ ID NO: 283964 - protein, 95 aa, Glycine max
  Clone ID: PAT_MRT3847_98445C.1.pep
GEKAFFILYDVAKKIWNLFITNHLLICIRRRQAPLKHTQLHRKAQHLSRLLLTRKMVAKPRCGDQRHSLTHRIATELTPQGVMNPSMGSRFNIRP

SEQ ID NO: 283965 - protein, 28 aa, Glycine max
  Clone ID: PAT_MRT3847_98446C.1.pep
GFAIVEAQDLPDLKLLFDETLLNHVDFI

SEQ ID NO: 283966 - protein, 61 aa, Glycine max
  Clone ID: PAT_MRT3847_98447C.1.pep
NSSNMKIYILSCRTEFNLKLHGPINLIDITFMLNLIILNNFEYFLLVYIILVSNTFRQFFY

SEQ ID NO: 283967 - protein, 65 aa, Glycine max
  Clone ID: PAT_MRT3847_98448C.1.pep
GHSHPGRDLCKSTPQCSTLRHLIKILACSESELANAWLNKCKTNEYMGIFYLNKMYVQWCPGMYL

SEQ ID NO: 283968 - protein, 48 aa, Glycine max
  Clone ID: PAT_MRT3847_98449C.1.pep
SSENLNPVSDYIRCFFRKFRLQSITCACRTHRFWRRGIRRKPSLTTFL

SEQ ID NO: 283969 - protein, 63 aa, Glycine max
  Clone ID: PAT_MRT3847_9844C.1.pep
RARKVYSVRQDLCVILGGHPTYSRQRWCLVISSGRSRSSSPRTQSSMSGQVSRLMYVPPLRQM

SEQ ID NO: 283970 - protein, 50 aa, Glycine max
  Clone ID: PAT_MRT3847_98450C.1.pep
VSGNFHKERGIWAKGRRVMMLMRDSREDARATCVRSALQKGPLPCHVGPT

SEQ ID NO: 283971 - protein, 110 aa, Glycine max
  Clone ID: PAT_MRT3847_98451C.1.pep
NLLKRGTKIKITGRVLKTREREKPGGYQNKKPGKKSPFGKGGKKKKGPNEWPFQKVANPKGEREPPLNRPIKRGGGGGNAKRNRKIGKGPNARSFRFFTFFFGNVGGFSR

SEQ ID NO: 283972 - protein, 152 aa, Glycine max
  Clone ID: PAT_MRT3847_98452C.1.pep
AQAFRKRKSQIASAVEDALEVAEFKGYSLRTRDSLSCWCPDSIGFNLIEHVLCHIVKNERPGAVLVFMTGWDDINSLKDQLQVHPLLGDHSQVLILACHGSMASSEQRLIFENPEGGVRKIVLATNMAETSITINDVGYGVALESKETSYDA

SEQ ID NO: 283973 - protein, 324 aa, Glycine max
  Clone ID: PAT_MRT3847_98453C.1.pep
MERVAEPKVLPRSLPVLVEVSNGHTAAIREAGQRLNGQDVSSVCGIPAREGNQFSKSRDGPMARLASIREVAQLSNARIVLVREDMGFDTRCQEPPSPVPVPTRTWKGKGSLPEAVELVSDIEKLKGSNDSFVETGPSSFAGASHPPEPVDTDLMRTVFVPIGQTKSEAGCLMKSVSLKGPFLEDLSIRVLAKKPSLAVVSPAEIMAEESNEMGNLSSPFSGARASQNTENSPLAPDSDEKECVWDASLPPSGNVSPHSSIDSTSVVRTMSIANSCASSYRSDADTSDGMLSWDRNCDSTKGSVRGDSLESAKTSASRASDSSG

SEQ ID NO: 283974 - protein, 90 aa, Glycine max
  Clone ID: PAT_MRT3847_98454C.1.pep
SEGAVLTRGGSCFNLERLLHATSFKDYYPIEYELNRRSTEKELHCWFWHYSFEGVSTNLECCHGIFTTQSVGTNTELKSTLTSLIFPGKE

SEQ ID NO: 283975 - protein, 67 aa, Glycine max
  Clone ID: PAT_MRT3847_98455C.1.pep
AWFISFIFYFITFFFQCCIRLGDLLNLVLYDLSHISFLYCVDEPGKQVRSAIRIKNTSKSNVAFKVW

SEQ ID NO: 283976 - protein, 89 aa, Glycine max
  unsure (1)..(89): unsure at all Xaa locations
  Clone ID: PAT_MRT3847_98456C.1.pep
TMIAAPAVTTVHHAGAGMAAPFTGQKSMVGFPTRKTNNGISCIGYNCLRLQCLQVWTPVVKSEVETLSYLPHLVDAQMAKEVXYLIRNG

SEQ ID NO: 283977 - protein, 130 aa, Glycine max
  unsure (1)..(130): unsure at all Xaa locations
  Clone ID: PAT_MRT3847_98457C.1.pep
MAXRSEEKTLSVLFTXLGLARESHAXDEDFWHAVWPNTPIPCTPAAXRGGXPTRGEAEEKTTXRGGARDPKTCRNKEDRHAGKTRKGQASKPPGQQPRGEATRAKERKDTTKEGHSEEEPRTKKEATEGE

SEQ ID NO: 283978 - protein, 53 aa, Glycine max
  Clone ID: PAT_MRT3847_98458C.1.pep
PPVEHMVKLCQVNEAASADEASEAFHHTGMVTAYVANGAGITVFPKAGRHSMA

SEQ ID NO: 283979 - protein, 68 aa, Glycine max
  Clone ID: PAT_MRT3847_98459C.1.pep
EHTTVWATCSTYSQYDVQVKTMHALHRGPHHTDIHMRLYGFQHAVTSSLMSPYLHYVHYLSSTMTLTP

SEQ ID NO: 283980 - protein, 131 aa, Glycine max
  Clone ID: PAT_MRT3847_9845C.1.pep
PRVRFIFDKPKTRCCTILPTESNLVVLQKFLNCVRIIMTKTAKLTCQVAINPYSMEWTGLGNRLLGKGSDILCCDYASFDGLITKQVMRKTAHMTNRLCGGDEKLMRERTHLLLARWPRTALCTKDVRRDE

SEQ ID NO: 283981 - protein, 77 aa, Glycine max
  Clone ID: PAT_MRT3847_98460C.1.pep
SASPSMRPRVRAAQKFVRNAFAKSSSSVDETLRASYRGSTPALATPTSVSRSVSRFARDGSLASRSPSVREGSNPPL

SEQ ID NO: 283982 - protein, 44 aa, Glycine max
  Clone ID: PAT_MRT3847_98461C.1.pep
NRASIAVYLTINALLFEPARGFYTLEHWLRQNICHWLTLILELP

SEQ ID NO: 283983 - protein, 174 aa, Glycine max
  Clone ID: PAT_MRT3847_98462C.1.pep
HNYPSPSYSSSTHYHLDNYPSVDSPEPCLSACSADNITFSASSSCASNNTTSSSEFPLRSLYPLLPDTTDEFVFHSNSTQSTINTPFGFFDNPLAEIFERRVDLGTLFLPANTPFSSSFTKVPHVVIKTEAEEGDHFLTGRKQREREEYEAADVRSRKQSAAHMDESELSEIVD

SEQ ID NO: 283984 - protein, 42 aa, Glycine max
  Clone ID: PAT_MRT3847_98463C.1.pep
MASKVVSVLVIAMMLVAMNCNCTSAGHMLLANEEGHDFHESK

SEQ ID NO: 283985 - protein, 242 aa, Glycine max
  Clone ID: PAT_MRT3847_98464C.1.pep
DISRSEIVSDDVDPRVQTFFFCGKPLKRRTTADQSLKNAVGLESSFPAGGTDILEKDDGISATIIRSRPDRDSVQSMSDCDQAVLQFAKTRKLSIERPDPRNSTFLRKRQFFHSHKAQPMAIEQVLSDKDSEDEVDDDVADFEDRRMLENVVDVSNDEKTFMHMWNSFVRKHRVIADGHISWACEAFSKLHAPEFVQSPSLAGCWRIFMVKLYNHGLLDARTMNDCNIILEQYQRQNSDPKS

SEQ ID NO: 283986 - protein, 62 aa, Glycine max
  Clone ID: PAT_MRT3847_98465C.1.pep
VWSLWSMEDRVLQDAAPSSNQSDVPATIVNSESLHSQIQRRGSPRSSLIPPSLRIARPVRRA

SEQ ID NO: 283987 - protein, 81 aa, Glycine max
  Clone ID: PAT_MRT3847_98466C.1.pep
MNGVETWLLESSSSSSASSSSSSLSNSSSSSSSSSLYSSSLFTSWKSGLGGAALNSTSPQDLDRNSRVIAVINEQAIMGRC

SEQ ID NO: 283988 - protein, 130 aa, Glycine max
  Clone ID: PAT_MRT3847_98467C.1.pep
MTRLFRSKSCGLVEFNAAPPSPLFHDVKSEDEYNEEEEEEEEEEEEEEEELDSDDDDEDADEDDDVSSNHVSTPFMNPGSKGHGCQSNQFAILDILVAALKKSLVTCSVEREDVSSLDISWPTEVRHVSH

SEQ ID NO: 283989 - protein, 527 aa, Glycine max
  unsure (1)..(527): unsure at all Xaa locations
  Clone ID: PAT_MRT3847_98468C.1.pep
MDSSSSSPNNNNHHKLGFQPARSRSRLAMASPANTSEPKIVTGTAGYILEDVPHFTDYIPNLPXTYPNPLQDNPAYSVVKQYFVHVDDSVPQKVVVHKDGARGVHFRRAGPRQKVYFEADEVQAAIVTCGGLCPGLNTVIRELVCGLHHMYGVKKVLGINGGYRGFYARNTITLTPKSVNDIHKRGGTVLGTSRGGHDTKKIVDSIQDRGINQVYIIGGDGTQKGASAIFEEVRKRGLKVSVVGIPKTIDNDIPVIDKSFGFDTAVEEAQRAINAAHVEAESVENGIGVVKLMGRNSGFIAMYATLASRDVDCCLIPESPFYLEGPGGLYEYIEKRLKENGHMVIVIAEGAGQELVSESVQSMSKQDASGNKLFQDVGLWISQKIRDHFAAQKTLPITLKYIDPTYMIRAIPSNASDNVYCTLLAQSAVHGAMAGYTGYTSGLVNGRQTYIPFYRITERQNHVVITDRMWARLLSSTNQPSFLDAKGDNEEKKEEEAALNQLPDGHCSKDTSLANKEINSSIYPTAC

SEQ ID NO: 283990 - protein, 93 aa, Glycine max
  unsure (1)..(93): unsure at all Xaa locations
  Clone ID: PAT_MRT3847_98469C.1.pep
MMMKSAMCAVVVVALLLLAEVGPMAEAVTCTPTELSPCLPAITXGAKPFLAGGAKLKQQKPCLCGYLRNASWKQYCNSPTARKTVAYCGIGFT

SEQ ID NO: 283991 - protein, 58 aa, Glycine max
  Clone ID: PAT_MRT3847_9846C.1.pep
SGNTFSSGTYIPYVSNESIYTIMDLDSKNYINQCKGLWPLVTLPDLFSSTNTYIYTTC

SEQ ID NO: 283992 - protein, 26 aa, Glycine max
  Clone ID: PAT_MRT3847_98470C.1.pep
LRGMSRLLMYHFGFNIIYISLKKNIT

SEQ ID NO: 283993 - protein, 61 aa, Glycine max
  Clone ID: PAT_MRT3847_98471C.1.pep
FTSPNIVYHFQKDEQMEGDDGYWFSAATEQIRRRGEKDGGACPTPYACNKMIFISYSKWWP

SEQ ID NO: 283994 - protein, 55 aa, Glycine max
  unsure (1)..(55): unsure at all Xaa locations
  Clone ID: PAT_MRT3847_98472C.1.pep
PCSILHSTYTIRTTASILHYFLVLSRSCYFLSFISDSVTPTXPINLDAQPVHNDG

SEQ ID NO: 283995 - protein, 59 aa, Glycine max
  Clone ID: PAT_MRT3847_98473C.1.pep
NVPERIEYLSLREYLVKYVINHTKTSISNDSQLYNFVTVKHISVTEVNSITEEHRLEKW

SEQ ID NO: 283996 - protein, 91 aa, Glycine max
  unsure (1)..(91): unsure at all Xaa locations
  Clone ID: PAT_MRT3847_98474C.1.pep
QIFVKTLTGKTITLEVXSXDTXXNXXXXXXGXGGIPPRXXXXXXAGXQLXDGGTLXXYXXQKESTLHLVLXLRGXMQIXVKLLRVRYLRGG

SEQ ID NO: 283997 - protein, 46 aa, Glycine max
  Clone ID: PAT_MRT3847_98475C.1.pep
QRTMIVLLLEAVLGQKLRKVTKFTPNSAPDLLFNSKWLISMSFGWL

SEQ ID NO: 283998 - protein, 64 aa, Glycine max
  Clone ID: PAT_MRT3847_98476C.1.pep
FAVLESFFHFLFSRSLYHTISHSKGVHYHIQFVHEPTSTSGDKAKPCTRSSFPSPDGNLSKNEI

SEQ ID NO: 283999 - protein, 108 aa, Glycine max
  Clone ID: PAT_MRT3847_98477C.1.pep
PTRPPETFKGNLVEWITELTSNAKLHDAIDESLVRKDVDSELFQFLKVACNCVSPTPKERPTMFEVYQLLRAIGGRYNFTTEDDILVPTDIGNTDNMQELIVAQEGSY

SEQ ID NO: 284000 - protein, 294 aa, Glycine max
  Clone ID: PAT_MRT3847_98478C.1.pep
MQAQSEPSLPVKESSKSQAKREMVKNKSPSDSSSRKETESKINSSKQKKTSFTGGKEKPTPPSLPLSPKHNVKKPQSLSSKSLKNMARESSLKPHENVEIKPELASSDNILHVTEPASENSSEDPTVACGASKLSSPSPSSSGNKSLKHTNEKTGKSALSASSRKGLGSVAGNKGKVNMRSVSRPLSVSSYVSTSNSSLRKQNNAASKSNKRGHDHEGENVKMGYKIRPKVSTKVGAANKSVLAARKLNFRRGKVIELQPQSNDVPRRLKFRPARILGDDMRRDINSARKKTIV

SEQ ID NO: 284001 - protein, 64 aa, Glycine max
  unsure (1)..(64): unsure at all Xaa locations
  Clone ID: PAT_MRT3847_98479C.1.pep
XIXIFSSHQSFKTFFYYXXEKKNSTFIQNEFSHSYNSNNFKNITILFKIFINNLLIYIFFLKTN

SEQ ID NO: 284002 - protein, 111 aa, Glycine max
  unsure (1)..(111): unsure at all Xaa locations
  Clone ID: PAT_MRT3847_9847C.1.pep
LXPRVVXLLFXLCXSXRPFFFRPFVARPPPSVVGPLCGGGXXVXLPPGXPTXAXXWPXXALFPPVXRXRTLLGLPAASAVLXXSWXXXAPXXRWSPPFLGPGQRRSCLRAV

SEQ ID NO: 284003 - protein, 138 aa, Glycine max
  Clone ID: PAT_MRT3847_98480C.1.pep
NSVGDIFPQVSLNFMGGASMVLNPEHYLMHYGFLDGAAMWCIGFQKVEQGFTILGDLVLKDKIFVYDLANQRIGWADYDCSLSVNVSLATSKSKDAYINNSGQMSASCSHIGTFSKLLAVGIAAFLVHIIVFMECQFL

SEQ ID NO: 284004 - protein, 52 aa, Glycine max
  Clone ID: PAT_MRT3847_98481C.1.pep
GIITLSFRALFFEDKTYRHNIHINKFIALPLLNHHHHHGQEHLYPNLFIINT

SEQ ID NO: 284005 - protein, 69 aa, Glycine max
  Clone ID: PAT_MRT3847_98482C.1.pep
VGVPLEITPSCNISLNFAHGSFLIRTVDIRISIRTQPNFLVIIRTTVSITIMIHFVLFHGLNTLFHDRI

SEQ ID NO: 284006 - protein, 48 aa, Glycine max
  Clone ID: PAT_MRT3847_98483C.1.pep
GISGAPPPPLTHSSQCPPAKGPSRLSSYVSYLELNQRDAPPTTGFLSF

SEQ ID NO: 284007 - protein, 59 aa, Glycine max
  Clone ID: PAT_MRT3847_98484C.1.pep
LARAGNARGWCLVIIGCYLVAPASGHMLFSKIKPCMCQFELVQIEQLRMGHYVSYCLLD

SEQ ID NO: 284008 - protein, 89 aa, Glycine max
  unsure (1)..(89): unsure at all Xaa locations
  Clone ID: PAT_MRT3847_98485C.1.pep
XNXXSTXNXPPSHEXSSXXNXTXXXFIXXLXWGXXLIPXXXXXXQXLXXXXHPLPXXSRHXRHQXKGXXNSXXXXIXXPRAEFRAYXRL

SEQ ID NO: 284009 - protein, 64 aa, Glycine max
  Clone ID: PAT_MRT3847_98486C.1.pep
SLVIQQIRKNKKPMAMDCDTKKITDMDGLWQNHGLCCNCFKVWYLLDTGAWPENMQFHKHKAIM

SEQ ID NO: 284010 - protein, 75 aa, Glycine max
  Clone ID: PAT_MRT3847_98487C.1.pep
KCNAENILLKMARILRTEGAVIFSDEVDVLIKVKKIVGGITWDTKMVDHEDGPLVPEKVMVAVKQYWVTNSTSTQ

SEQ ID NO: 284011 - protein, 123 aa, Glycine max
  unsure (1)..(123): unsure at all Xaa locations
  Clone ID: PAT_MRT3847_98488C.1.pep
KRAVTKPNLKGGGAPTWEKXFLRSPQDPSPPKAVSYKPPGRENLIRRGTPIVGIFGAQWGVPPGGPKGESGPFKLPNPXKTFRSSFPSQQKSGXPIYQYEKKGVQKGAQAPLNVVSAGGHQVR

SEQ ID NO: 284012 - protein, 78 aa, Glycine max
  Clone ID: PAT_MRT3847_98489C.1.pep
TLFQGGLCIFTQVFLGRVLHFAMIWNTYLRIILLGPIALHHIVCFEFESHNIVRLALNSLLFLVWITAYITMPGLPTN

SEQ ID NO: 284013 - protein, 96 aa, Glycine max
  Clone ID: PAT_MRT3847_9848C.1.pep
MATCAIQQSSVSGQTVQKQLNEFVRKSGGSGISLMNISCTVSSAPQSIWYGADSSMVLGPLLDQFLSHLTGEFPGDYGWDTAGLLDDPDIFARKRG

SEQ ID NO: 284014 - protein, 67 aa, Glycine max
  unsure (1)..(67): unsure at all Xaa locations
  Clone ID: PAT_MRT3847_98490C.1.pep
HSSAFSPYLFSIFLHHIKFTINYRYFPNXVGLKTLIYHCNVNPYVRVNISIFNDHKNPTLTITKVQL

SEQ ID NO: 284015 - protein, 48 aa, Glycine max
  unsure (1)..(48): unsure at all Xaa locations
  Clone ID: PAT_MRT3847_98491C.1.pep
WICCRNGSSTSCVSVFCSKLKTPFPFIQKRRKAQALXANXXXXTIDLQ

SEQ ID NO: 284016 - protein, 314 aa, Glycine max
  Clone ID: PAT_MRT3847_98492C.1.pep
MLEIKTAKTRKGKRELEKRAPKLVESGKKTLILHGTKTSGVLNAVLAQIYHLKKDSAVKYSRKNENVKPFEAGGETSLEFFSLKTDCSVFVYGSHSKKRPDNLVIGRTYDHHIFDLVEVGVENFKPMESFSYNKKLAPKEGSKPFIVFIGEGFEAVEELKHLKEVLLDLLRGEVVENLNLAGVDRAYVCAALSPNRVFFTHCALRLKKSGTVVPRMELEEVGPSMDFVVRRHRPPNESLRKEAMKTSREKPKKKEKNVKKDELQGKIGSIYIPDQKVGETPLPYKAKGVKRERRESKRKNESDGSASKRKKEDS

SEQ ID NO: 284017 - protein, 33 aa, Glycine max
  Clone ID: PAT_MRT3847_98493C.1.pep
FFFSYSIPENVIAKNVVLYLEIKLTCSLMKFQG

SEQ ID NO: 284018 - protein, 479 aa, Glycine max
  unsure (1)..(479): unsure at all Xaa locations
  Clone ID: PAT_MRT3847_98494C.1.pep
KEGNVVKTYYVGQLTSPASGLRSFEVLGSGKSNNDLSTTERQEIQIKKAKLINMLDEVEQRYRQYXHNQMKIVISSFEQAAGIGSARTYTALALQTISKQFRCLKDAITGQIRAANKSLGEEDCFGAKIEGSRLKYVDHHLRXQRAFQHLRMIHHNAWRPLRVLARIALSVLPDWKFEHFHNPYTKDSDKHMLAKQTGLTRSQVSNWFINARVRLWKPMVEEMYLEEMKEHELNGSEEKSSKSGEDPATKTTSPQEKRTSSEIESKSFNSKQDVSKQSQNTPILPTSPPSISPIGGSVKNQSGFSFMGSSELDGITQGSPKKPRNHEILHSPNRVPSINMDVKANEANNEQQLSMDHERQNNRDSYSFMGNQTNFISGFGQYPIEEIGRFDAEQFTPRFSGKNGVSLTLGLPHCDTLSGTHQSFLPNQNIQLGRGLDIGEPNQFGALNNSNSHNSAAFESINMQNPKRFAAQLLPDFVA

SEQ ID NO: 284019 - protein, 62 aa, Glycine max
  Clone ID: PAT_MRT3847_98495C.1.pep
WACYLIFCCFACLRIYFWGSFLRIVFMPLIVSFSAYVILRNTTQALYSRLTCIKLKLRAIKL

SEQ ID NO: 284020 - protein, 64 aa, Glycine max
  Clone ID: PAT_MRT3847_98496C.1.pep
DFNNYIFHVIVGTKNFLTFMNRFLRSSSSLVLIFMLIADTITEYMKRRNNDNNKNWYAKRTRGR

SEQ ID NO: 284021 - protein, 60 aa, Glycine max
  Clone ID: PAT_MRT3847_98497C.1.pep
FSAAQMCFLSNPSVFRDGLRCPLLDNHFFCATYAAVCSHKYVTLRNLLFDKCFFRFSRVG

SEQ ID NO: 284022 - protein, 70 aa, Glycine max
  unsure (1)..(70): unsure at all Xaa locations
  Clone ID: PAT_MRT3847_98498C.1.pep
RRLQDLQSQPSNNICVDCSQKNPQWASDSYGVFMCLECYIKHRCLSXHISFVRSVTMDSWSEIHIRKTES

SEQ ID NO: 284023 - protein, 47 aa, Glycine max
  Clone ID: PAT_MRT3847_98499C.1.pep
VHPSLGLIQKIQHNLNPPSIKSIEKPKEGKFWNYIRSRKGDSSNQIK

SEQ ID NO: 284024 - protein, 68 aa, Glycine max
  Clone ID: PAT_MRT3847_9849C.1.pep
EFRFLNQFTIESSRARSMAICAPRWSPCHHAPLLRWEIMVLLLDAEWPCLYKEPFPLIIIKRSGVPYF

SEQ ID NO: 284025 - protein, 408 aa, Glycine max
  unsure (1)..(408): unsure at all Xaa locations
  Clone ID: PAT_MRT3847_984C.1.pep
MQTPDDVRNLPIDITFSRLGEWLVDRKRVPADWRKRVAAIRARISKEFPSLPKDSDPFFQTLDPEGIGYLEAKQIYDDLLKSTSESRNIFGRLSGAAGAWEAIVRSFEKDHVFLGEAAQILIQNVSYEIPYQRKQVQKIQQHLLELDRKEADIKRSAALSATKYAEACQELGLQGKNVRVELLETALLLPSTFSKILDVVNSDNLSRAIEYYSNFVRDAHIEKDRSLGDVLQNLKNMRENPPSLNVAVDSEIINDVNVHSSKNGLDPAIANTEIAVPDIDWDISVDSSQLDWDIGTVEETEDNGNGLGPYEIINASDIGSDLTISNQEIGSPADISWDISVDTPQVDVIDDDNAPTVVLENQTSLPDSLSQLTGNXGRRSQLLDTEYRNKILDDLYEMKXFLINGWLN

SEQ ID NO: 284026 - protein, 173 aa, Glycine max
  unsure (1)..(173): unsure at all Xaa locations
  Clone ID: PAT_MRT3847_98500C.1.pep
TTRILFLRSTTIITSFSLRTDHTMATSSAKSVHDFTVKDAKGNDINLGDYKGKVLIIVNVASQCGLTNSNYTELSQLYEKYKQKGLEILAFPCNQFGAQELDLMNKKILGRXQCVNALQVSNXFDKVDVNGDKTAPLYKYLKSSKSGLFGEQTGRAGNSGIFMQSVWGTGAWI

SEQ ID NO: 284027 - protein, 275 aa, Glycine max
  Clone ID: PAT_MRT3847_98501C.1.pep
MEIQFQQPNLQHQKSGIAITKGGKFKGRSRNNNTNKFAGVRQRPSGRWVAEIKDTTQKIRMWLGTFETAEEAARAYDEAACLLRGSNTRTNFITHVSLDSPLASRIRNLLNNRKGIKKEEDANANANNAPAPRVSTTSSATSTGTSSNSSNGNDNNDQSLSTVTTQSSNLFDDAYKPDLSNCREEFESGHQSNTSWCFGPVFDRFPMAQIFDIPKIDDGLTNAADLDLSEFERMKVERQISASLYAINGVQEYMETVQDSNETLWDLPPLCSLFC

SEQ ID NO: 284028 - protein, 76 aa, Glycine max
  Clone ID: PAT_MRT3847_98502C.1.pep
LLKKAFIIDSHEDSKQCLSNLSPKENVSEEPKLMTRNKWSAIVYRRGQKQLTRLFLKEAEHALQLSLNEEEFTFPC

SEQ ID NO: 284029 - protein, 248 aa, Glycine max
  unsure (1)..(248): unsure at all Xaa locations
  Clone ID: PAT_MRT3847_98503C.1.pep
ISKIKLIIFNWKRQSSITGTRPRQVSQYAEKGRYINIFVPDALYFSHSYILPPLNNYKIIFFFFFSSILLQSQPHPLPSLSSHFLQTTSFVFLFPNRSHYGHLNAKSVHDFTVKDAKGNDINLGDYKGKVLIIVNVASQCGLTNSNYTELSQLYEKYKQKGLEILAFPCNQFGAQEPGSNEQIXRGYVCTRFKAEFPVFDKVDVNGDRGCXLYKYLKSSRGGLLEDGIKYADSSPISCEGKVVDRYAS

SEQ ID NO: 284030 - protein, 46 aa, Glycine max
  Clone ID: PAT_MRT3847_98504C.1.pep
FFNKSSSKQFAYSIIIPKSQTYLKMSFHVIWHFCYFSPFRRGLSFG

SEQ ID NO: 284031 - protein, 166 aa, Glycine max
  Clone ID: PAT_MRT3847_98505C.1.pep
MATSSAKSVHDFTVKDAKGNDINLGDYKGKVLIIVNVASQCGLTNSNYTELSQLYEKYKQKGLEILAFPCNQFGAQEPGSNEQIQEFVCTRFKAEFPVFDKVDVNGDKAAPLYKYLKSSKGGLFGDGIKWNFSKFLVDKEGNVVDRYAPTTSPLSIEKDLLKLLDA

SEQ ID NO: 284032 - protein, 60 aa, Glycine max
  Clone ID: PAT_MRT3847_98506C.1.pep
GINHFDIFGGVYVNVKKPFRLSPTLEIPFDTHQMYLSFSTKKKCWRVHFFPPKPIHSFFL

SEQ ID NO: 284033 - protein, 166 aa, Glycine max
  Clone ID: PAT_MRT3847_98507C.1.pep
MATSNAKSVHDFTVKDAKGNDINLGDYKGKVLIIVNVASQCGLTNSNYTELSQLYEKYKQKGLEILAFPCNQFGAQEPGSNEQIQEFVCTRFKAEFPVFDKVDVNGDKAAPLYKYLKSSKGGLLGDGIKWNFAKFLVDKEGNVVDRYAPTTSPLSIEKDLLKLLDA

SEQ ID NO: 284034 - protein, 605 aa, Glycine max
  Clone ID: PAT_MRT3847_98508C.1.pep
MEGEEGGGIRLSKRIANGEVDYKTKSGTAWSHSYLNQKPWHPLSYPNQRRKWIAEQTHANRQRRTEEVSREFAQEQEFFRQTALISKKEKEKVELMQAVSFMYVRPPGYNAESAKAAEMNDEKKKEDMSKGLSADEGPSSSMPPQSSSHLNEEKKKPRPKDVFGRPLPTEEEFEVLKNAPRLETGAPARVKPFGIEVRNVKCLRCGNYGHQSGDRECPLKDAIMPNEESRLKRDDPLNAILAHTDPTEPLKWELKQRPGISPPRGGFKPDDPNQQIVAEDDIFDEYGGFLSMDNIPELLTNFSKKPKKSKKSKHKKQLQLNSDSEASSDDGERRSKKKKVKVNKKKRDRARSSSSETSVSVEGHGKSRHKSSHSSEDSDSYWNDRSRTKRERSFSSKGSDHSRHGRSKHNRRKHVYSSEDSDSQRDDQSRKNIQKHKSKDSKKRHSYSYENSGPARDHADNKSRDALSYSSDDSNHQRQPKVKRSSLKHSSTAHCDSQKHDRNYGFDRYQGDQSRAVSEDSDVHKDDLNRRMKQKYRHTPKGSEHPESDMDKQNRKKQCYSLKDSSAADGYHRSEKSRYYEHSYSSDYSDHREKHHKSRRSSYKY

SEQ ID NO: 284035 - protein, 87 aa, Glycine max
  Clone ID: PAT_MRT3847_98509C.1.pep
MLSISATRIFFLRSTTIRLSSSSSSLQFFSNPNRTLFRPFLHTSFKPLPSSFSFRTDHTMATSNAKSVHDFTVKDAKGNDIAYACKF

SEQ ID NO: 284036 - protein, 273 aa, Glycine max
  Clone ID: PAT_MRT3847_9850C.1.pep
MYTNIGMPPGVPQHHPQPPTSSQPNLFGNAFNSAGSGLIRGGLGAYGEKILGSSSEYVQSNISRYFSDPQYYFQVNDHYVKNKLKVVLFPFLHRGHWTRITEPVGGRLSYKPPIYDINAPDLYIPLMAFGTYVVLAGISLGLRGMFSPEALNWLFIKGLVGWFMQTALLKVTLLSLGSGEAPLLDIIAYAGYTFTGICLAVLGRIILGYSYYFLMPWTCLCMGVFLVKTMKRVLFAEVRSYDSSRHHYLLLFIALVQFPLFTWLGNITINWLL

SEQ ID NO: 284037 - protein, 75 aa, Glycine max
  Clone ID: PAT_MRT3847_98510C.1.pep
VTRSKKNISSSLECYITPKGSKTLALIMGVIDGSSSDGHTMPWTRCVKRNIPSTVIILPEGFSSIAKIHGLRLRG

SEQ ID NO: 284038 - protein, 121 aa, Glycine max
  unsure (1)..(121): unsure at all Xaa locations
  Clone ID: PAT_MRT3847_98511C.1.pep
MKPNTFIIFIIFFFTITTCSSSTDSVEIIPFKEAYKVQVTVYYESLCPYCXNFIVNYLIDVFNECIHSIAYVKLFPYGNSKVNSNCNITCQHFXQNCLLNTFXACSINTCPDVHDHFPFIF

SEQ ID NO: 284039 - protein, 54 aa, Glycine max
  Clone ID: PAT_MRT3847_98512C.1.pep
NFSPTTFQGRKMAPQRCFRGPKNKVLFPKRNLKKGFPIPKKQKGPQITQPYPGR

SEQ ID NO: 284040 - protein, 80 aa, Glycine max
  Clone ID: PAT_MRT3847_98513C.1.pep
TRVIFRISRWEFCYGSPTPGKLCRIFRRSLYFRTPLELVALRIFLPFKRGRLRRWITLKLWAPCCIRTRPRSRGRMRGRT

SEQ ID NO: 284041 - protein, 81 aa, Glycine max
  Clone ID: PAT_MRT3847_98514C.1.pep
LTNINTYISAFFHSIFSLAFSTFSLFLTVWNNIRVLIIQFEEPKDHKQSTQEGSVLFIFPRYFRDGLSILCFFTRCWFSSN

SEQ ID NO: 284042 - protein, 73 aa, Glycine max
  Clone ID: PAT_MRT3847_98515C.1.pep
LFGISPFSSLFGILSTQMRGPGTLKRLGPKGVRGCSHFGGVLSCTCFFLHGRGGVFWPPLLLYRKKKKLFGRT

SEQ ID NO: 284043 - protein, 78 aa, Glycine max
  Clone ID: PAT_MRT3847_98516C.1.pep
LKINPSVPLKTLIQIVKDLKPTKPDCYLSLSVPDIAYFVPRRFLWHAYTPYKGMHPWHYHLFKRENKPHAKASLMGVK

SEQ ID NO: 284044 - protein, 140 aa, Glycine max
  Clone ID: PAT_MRT3847_98517C.1.pep
PELTNEVIVSCIKSANNMNRGLYPKMPDSVTLAESFLTEFPGINPLTAHSILSSGVKLNEFLVWSHEQRMHVLEKYHVPDESISLFSVFCRYGEREDSKSIMTDCSSSVSSGLDSDWCCLYQVENERKRKNPISSHQIDE

SEQ ID NO: 284045 - protein, 133 aa, Glycine max
  Clone ID: PAT_MRT3847_98518C.1.pep
NSAPGVAKVAVQKAQKKLKSTQVKYEKEVEQKEANHKGKILELKQAENNKKELYVKNTDKNATDKPEGPDQTIEIVTKYWGLRNNEASVCEELVQETRHRCQEVVDETKLVQETLECGTMDKSLKFNETGEVG

SEQ ID NO: 284046 - protein, 80 aa, Glycine max
  Clone ID: PAT_MRT3847_98519C.1.pep
LSTSFLKCFYFSFWIDHSRSQKRSAFWIDHSISHKGGAGSNSPLSFGKFACYKRFTRRNPILRTKQSNALWPLVHNRPNM

SEQ ID NO: 284047 - protein, 59 aa, Glycine max
  unsure (1)..(59): unsure at all Xaa locations
  Clone ID: PAT_MRT3847_9851C.1.pep
DLXGHXRADTEALHPHSADSADPDATMAYQKPHLSNHDRVPDRALPILQSTSVHAHMLT

SEQ ID NO: 284048 - protein, 118 aa, Glycine max
  Clone ID: PAT_MRT3847_98520C.1.pep
KLFPKTKKRGTKAHKIKKKKRPGLPPPMNGKQTMGWTFIHLGGIFLERPLMLHFTTKKLKISRVAKPCKKKTPMVGSFKPGLKKKAHSLGKNGGPNYGEGAMSIKKGREGLKNVLDPE

SEQ ID NO: 284049 - protein, 69 aa, Glycine max
  Clone ID: PAT_MRT3847_98521C.1.pep
FSFITTHNSFTNTHNKTNTCHPLTANQKKKVLKKKRLVWKHIQPPKEHQKPFYPHFTLGQIKTPKNHRN

SEQ ID NO: 284050 - protein, 48 aa, Glycine max
  Clone ID: PAT_MRT3847_98522C.1.pep
KRGKLKVQGGTREYLGSKQKFRKHQTYLFRLTLENKTVKLLKPQSRLK

SEQ ID NO: 284051 - protein, 39 aa, Glycine max
  Clone ID: PAT_MRT3847_98523C.1.pep
SSATSWRYYQHCRLQGLDALFNIVDIISGRLFYYSWDQI

SEQ ID NO: 284052 - protein, 49 aa, Glycine max
  unsure (1)..(49): unsure at all Xaa locations
  Clone ID: PAT_MRT3847_98524C.1.pep
RGQEDQRLKILSFSRPKQNVXXQQSCCNIXPKRXNILILQLXXTTXXXX

SEQ ID NO: 284053 - protein, 74 aa, Glycine max
  Clone ID: PAT_MRT3847_98525C.1.pep
RRRSTLRHREGQNCCSLQLHPQAILRFPRTGEDVCPLVQHLLYASSILCTANSCLARRPSALCTYTAGLLLFWR

SEQ ID NO: 284054 - protein, 463 aa, Glycine max
  unsure (1)..(463): unsure at all Xaa locations
  Clone ID: PAT_MRT3847_98526C.1.pep
MGEDGNSWIRRTNFSHTVCHRLDPARLGSIPISVQSEQKSRPSSKAQRHPMTYKQRSLSPLPETYLSEAFREARLEQKRFSTPNPRREKRIMGKLLNKXDSRETKESSSKSPSRSPNRQVKSKNRKDSAWTKLLDNGGGKITAVETAEEWNVDMSQLFFGLKFAHGAHSRLYHGVYKDEAVAVKIIMVPEDDGNGALASRLEKQFIREVTLLSRLHHQNVIKFSAACRKPPVYCIITEYLAEGSLRAYLHKLEHQTISLQKLIAFALDIARGMEYIHSQGVIHRDLKPENILINEDNHLKIADFGIACEEASCDLLADDPGTYRWMAPEMIKRKSYGKKVDVYSFGLILWEMLTGTIPYEDMNPIQAAFAVVNKNSRPIIPSNCPPAMRALIEQCWSLQPDKRPEFWQVVKILEQFESSLASDGTLSLVPNPCWDHKKGLLHWIQKLGPLHQNSGPVPKPKFT

SEQ ID NO: 284055 - protein, 463 aa, Glycine max
  Clone ID: PAT_MRT3847_98527C.1.pep
MGEDGYSWIRRTKFSHTVCHRLDPARLGSIPISVQSEQKSRPAASKAQRHPITNKQRSLSPLPETYLSEAFREARHEQKRFSTPNPRREKRIMGKLLNKDSRETKESSSKSPSHSPNRQVKSKNRKDSAWTKLLDNGGGKITAVETAEEWNVDMSQLFFGLKFAHGAHSRLYHGVYKEEAVAVKIIMVPEDDENGALASRLEKQFIREVTLLSRLHHQNVIKFSAACRKPPVYCIITEYLAEGSLRAYLHKLEHQTVSLQKLIAFALDIARGMEYIHSQGVIHRDLKPENVLINEDNHLKIADFGIACEEASCDLLADDPGTYRWMAPEMIKRKSYGKKVDVYSFGLMIWEMLTGTIPYEDMNPIQAAFAVVNKNSRPVIPSNCPPAMRALIEQCWSLQPDKRPEFWQVVKILEQFESSLASDGTLSLVPNPCWDHKKGLLHWIQKLGPLHQNSGPVPKPKFT

SEQ ID NO: 284056 - protein, 130 aa, Glycine max
  Clone ID: PAT_MRT3847_98528C.1.pep
KKKKKKKKKGEKKKKKTPKKTKKPKKRKKKKKRGGRTRGTKLTTPGRQRNKPQEGDPKKKKTGRRVKTRGREKPRRHQTKRPGRKTPRHQRAKKQEGPHRPPYQKRAQPEGQKEPAQKRPQKPGGGGGTP

SEQ ID NO: 284057 - protein, 143 aa, Glycine max
  Clone ID: PAT_MRT3847_98529C.1.pep
GIRLQFIFLLKNFTFQELSTSLHQPDFPKFQSLTFPFIKPNTQQRQTKHHPLQTIPWHTQARVFFCYYSFTHGRLLQELLLHKPDEHPSIPGLPDHIAQLSLSSISPCKSFSIFHFLPPSQYTPLLSLPYYMSTPFSTTATLT

SEQ ID NO: 284058 - protein, 109 aa, Glycine max
  Clone ID: PAT_MRT3847_9852C.1.pep
CVLYRDHPTKCPSLSYFHCELLACLGSPFSVVVCTALCVGFILCVCVLLCLLLPVWLPNVIPAYVTNLTSNRFHRGSSFPSCHSSFIPPIHIPYSLLVRLVLGFFPTSR

SEQ ID NO: 284059 - protein, 406 aa, Glycine max
  Clone ID: PAT_MRT3847_98530C.1.pep
MEKLLEKLRCRTLTVTNGSEAIRYAMGEVKFDVIMMEFRLPQVNGADVARMIRDTKNANTHTPIVAVTGYLKELQAPHYFDALIEKPPTVAKLTDTLSRLCQWKAPPPGWTPNQVYPSMMPSGLRQESSRQEDSPTTSNSSGYPPVPSASYRGSSREDSISSSFFGDNDSRAGEDMSVRVHNADDWRERDIARAMSGLGISDDAANADHKGAIPNRIGAPDLPHGESAPAVLEEATIRRQRSAEQVGAKRRILETRKHESAESGDDEDDELGHAPVRTRSPKTRPKSTSKLGIEMMRTNSRGSVISVEDVGQADSALPSSPPPMITEDPAAEEHESNLDAPTVAPVLLTPPVMFPEEPGDDVADFVIETPKSHKDATSPDPDPTPKAKSARTPDSEPTGLDSATDT

SEQ ID NO: 284060 - protein, 53 aa, Glycine max
  Clone ID: PAT_MRT3847_98531C.1.pep
VTIFSNKRALVSSSQPAPTSSILFRPLWRLMQYFCIGFEVLHHRKLPLEKIVA

SEQ ID NO: 284061 - protein, 78 aa, Glycine max
  Clone ID: PAT_MRT3847_98532C.1.pep
LWTLTLQYWVFSFSLSLITHSKAIITMQSAGDLSDSLNRAMSPTGWDDVSDYSARRAIFQDVYRRLPACFIEKSNLEN

SEQ ID NO: 284062 - protein, 71 aa, Glycine max
  unsure (1)..(71): unsure at all Xaa locations
  Clone ID: PAT_MRT3847_98533C.1.pep
TKKIPPALGKGKKIVFFTKVDPFPEALRAVFFGVKKKILSSNPPNPMLTRFFXNCKSLKNLVEKGPFPFVN

SEQ ID NO: 284063 - protein, 120 aa, Glycine max
  Clone ID: PAT_MRT3847_98534C.1.pep
MEPMDIVGKAKEDASLPKATMTKIIKEMLPPDVRVARDAQDLLIECCVEFINLVSSESNEVCNKEERRTIAPEHVLKALGVLGFGEYIEEVYAAYEQHKLETMVIMLMTNVHDIYYNLTA

SEQ ID NO: 284064 - protein, 84 aa, Glycine max
  Clone ID: PAT_MRT3847_98535C.1.pep
MLFWLCYVQEGEFFSKNGYPKMPFPHGWKGNAGLYAVGFTKRGLSGASSDAVKIAQDIGQVWKNETKQKKQRTTACHRRCISQF

SEQ ID NO: 284065 - protein, 81 aa, Glycine max
  Clone ID: PAT_MRT3847_98536C.1.pep
MKTMLSRDAINIHGGVSIREYAKVIKVDDTRIKLVRDFKHLNLDSQLTTDIYGSTQLLSDAWFVSRKSYYIIRTDLSQLEN

SEQ ID NO: 284066 - protein, 156 aa, Glycine max
  Clone ID: PAT_MRT3847_98537C.1.pep
MEPMDIVGKAKEDASLPKATMTKIIKEMLPPDVRVARDAQDLLIECCVEFINLVSSESNEVCNKEERRTIAPEHVLKALGVLGFGEYIEEVYAAYEQHKLETMQDSLKGAKWSNRAEMTEEEALAEQQRMFAEARARMNGGAITSKQPDAHQSLES

SEQ ID NO: 284067 - protein, 156 aa, Glycine max
  Clone ID: PAT_MRT3847_98538C.1.pep
MEPMDIVGKAKEDASLPKATMTKIIKEMLPPDVRVARDAQDLLIECCVEFINLVSSESNEVCNKEERRTIAPEHVLKALGVLGFGEYIEEVYAAYEQHKLETMQDSLKGAKWSNRAEMTEEEALAEQQRMFAEARARMNGGAIQSKEPEADQSLES

SEQ ID NO: 284068 - protein, 94 aa, Glycine max
  Clone ID: PAT_MRT3847_98539C.1.pep
TSPAINSVHTDKPPLSGRQLLIKREYGQNGVGHAEADAGEDYRDSILHEREANKVPLYLFYFKTPKLESFPKWRYNPSHTLQHSQVGVPLPLPA

SEQ ID NO: 284069 - protein, 163 aa, Glycine max
  Clone ID: PAT_MRT3847_9853C.1.pep
SVPARQSLVPVSYSIGGPSPLSVFVAPKAPGKIPAKESLDFVKESFDSRPGMFPTTVGIKRGGKNRFLKTPANGPFGKEAPAFTWEVANPLKWGGAKGPSFPTVVCWEFFNLCPNQIYNLFRLFTLIGGGFPLFLPPPHFILFLQPPKVIFLHDPLTVNPNFF

SEQ ID NO: 284070 - protein, 83 aa, Glycine max
  Clone ID: PAT_MRT3847_98540C.1.pep
GGARHCYRLVKEKGFEESLAASMADPEDGVSFLVGQTKMSDTSNEINNGLTKDCDDLTTEAAEGMRHANEMKTDLSNMTHQAK

SEQ ID NO: 284071 - protein, 220 aa, Glycine max
  unsure (1)..(220): unsure at all Xaa locations
  Clone ID: PAT_MRT3847_98541C.1.pep
MDRSVSRSRSPSRRRRYSPSTVSHHRHSRTSHRRRRRHRTSSSPSLSRSPTPKPKKDQKKSKRHHEEELKLLEEETARRLEEAIRKNVEEKLNTEEVKLEIEKRVTEGVKKLFDDVEAQLEKEKEDALTEARRKEEQARKEREELDKMLEENRRRVEESQRKEALEQQRKEEXERQRELEMIQRQKEEAALRKKLEDEEEHANRINSLGKNKSRPKSYGF

SEQ ID NO: 284072 - protein, 140 aa, Glycine max
  unsure (1)..(140): unsure at all Xaa locations
  Clone ID: PAT_MRT3847_98542C.1.pep
MAASIISSCSRNLLESKRHHEEELKLLEEETARRLEEAIRKNVEEKLNTEEVKLEIERRVAKGVKKLFDDVEAQLEKGKEDALTEARRKEEQARKEREELDLMLEENRRRVEESQRKEALEQXRKEEERQRELEMIQRQK

SEQ ID NO: 284073 - protein, 90 aa, Glycine max
  Clone ID: PAT_MRT3847_98543C.1.pep
IRSKLKMKQKNKRRSSDSHEHTVDDFSTGTVVSYSFLSFFCYERVLLRRLAAFQKRQGCPAFHFLLSFIFVSEYQCTDFESGERGSGKYE

SEQ ID NO: 284074 - protein, 61 aa, Glycine max
  Clone ID: PAT_MRT3847_98544C.1.pep
ERHHIGLYFIFTLSCLGGASRKGKLGKATFVEGIITFMPNVGSGQSALTTDWKGSDGEAII

SEQ ID NO: 284075 - protein, 231 aa, Glycine max
  unsure (1)..(231): unsure at all Xaa locations
  Clone ID: PAT_MRT3847_98545C.1.pep
CQSIYGSPYWMAPEVIKNSNGCNLAVDIWSLGSTVFEMPHTKPPWSQYEGVAQKFKIGNSKDLPAMQDHLSNEGKYYNKQCLIRNPVHRPSADQLLPHQYVKYATLCPLVLSAHPLLAKHDIVLTMXFQAIGPAKHNLGLVSEAAGTYLSRSLRTGSGSSEAHTPRNISYPVSPTGNPLLPPRLLHVSGRLSPSSPHTASGSSTPLTGGIGAVPFHQTKQPMFSHEGISVI

SEQ ID NO: 284076 - protein, 97 aa, Glycine max
  unsure (1)..(97): unsure at all Xaa locations
  Clone ID: PAT_MRT3847_98546C.1.pep
VRCEHGVRKALGSLKSVENAEGNGGPGTMKKITLLEDGETKFVLHKIERIDEANXGYSYSGEGGAWLPDTADKITFVLQXVAGPNGRSVGKLTGNTK

SEQ ID NO: 284077 - protein, 48 aa, Glycine max
  Clone ID: PAT_MRT3847_98547C.1.pep
LQDEYIDYQTIISPLSCRLKNKCVRNYWLLQPFSSHQMEKLTDGWLLM

SEQ ID NO: 284078 - protein, 79 aa, Glycine max
  unsure (1)..(79): unsure at all Xaa locations
  Clone ID: PAT_MRT3847_98548C.1.pep
MIALGCKWLYNMGLIVYGSVNAFKAWIVILGNXKYRGSISHRLXPISKMVTVRILLAGTATHAXELHQIYVHNAFLHGD

SEQ ID NO: 284079 - protein, 76 aa, Glycine max
  Clone ID: PAT_MRT3847_98549C.1.pep
CLHCPLALVTPNDGTPCTSLQIHPHAPLMLAASSSPISCCLVSPLFETCRTYFSTSLPKLPLFLLSLLGFTLTGGP

SEQ ID NO: 284080 - protein, 155 aa, Glycine max
  unsure (1)..(155): unsure at all Xaa locations
  Clone ID: PAT_MRT3847_9854C.1.pep
SFFFSWAXXXXXVXLXSGXCXXFXXPXXWLLAXSGXLXXXXAXXXXVXVSXSXLCWXPAPRLVVXXRXALXXSKKRVFCPPPPAMXXCPFVXLXXXSXXSXCPXXXXSSPXXWAGXXFXXCXXPXVVALCFWLXAXACRASXCFXCPNXXAPAGS

SEQ ID NO: 284081 - protein, 120 aa, Glycine max
  unsure (1)..(120): unsure at all Xaa locations
  Clone ID: PAT_MRT3847_98550C.1.pep
PVTIPPVVLAPIVKPPGFLPPILNPPNTPTPSPGKGGNTPCPPPXSPAQATYPINTLKLSSYINLLSNLVTLALETLVLNQSIPCFKSLFNLEPTIIVITILNLNLLNLTFIVHRPFQLL

SEQ ID NO: 284082 - protein, 30 aa, Glycine max
  Clone ID: PAT_MRT3847_98551C.1.pep
ERNKHNERFHCQVPLTSPMSFPSHGLQHKT

SEQ ID NO: 284083 - protein, 85 aa, Glycine max
  Clone ID: PAT_MRT3847_98552C.1.pep
GLTTFPWAVGGINPFLGAIPGLFYLPEPRGRFFFKGYLGGGWWEKFLAQKIFFSLFSQKKKKKKKKKKKKKKKKKKKKKKKKKKK

SEQ ID NO: 284084 - protein, 63 aa, Glycine max
  unsure (1)..(63): unsure at all Xaa locations
  Clone ID: PAT_MRT3847_98553C.1.pep
NPNGTEAFQHLACPQLLTTPNITYDDLLIMPDVDNISNAHTINSLXFSHHVPTLLHLHLNNYL

SEQ ID NO: 284085 - protein, 75 aa, Glycine max
  Clone ID: PAT_MRT3847_98554C.1.pep
RVANITSRKFSNRIKNERRLFSRKKNLFQWKGFFVFIFPQKNTPWKTPNKKWGFFSHPLLLFPQLKQPKKSLLGF

SEQ ID NO: 284086 - protein, 42 aa, Glycine max
  Clone ID: PAT_MRT3847_98555C.1.pep
PEEHFRRLYLWVIMLESNRREVQVMNARIDYKLEDHMTFVAC

SEQ ID NO: 284087 - protein, 214 aa, Glycine max
  Clone ID: PAT_MRT3847_98556C.1.pep
ARAANKPEGRENRTKGATSGSSEPGDEDDEAGACEQSTNPADMKRLRRKVSNRDSARRSRRRKQAQLSELELQVEKLKVENATLYKQFTDASQHFREADTNNRVLKSDVEALRAKVKLAEDMVTRSSFTTLNYQLLQTQQHQMSTPPQLNTTNLRRMAHVSPTITVHGNDASYNGVTVGEQNSSALGNLDMTFNNINNGVMNNAMSCGTIWPLD

SEQ ID NO: 284088 - protein, 288 aa, Glycine max
  unsure (1)..(288): unsure at all Xaa locations
  Clone ID: PAT_MRT3847_98557C.1.pep
MAMTTTTESDLDYELRYLSLAVTDTFTAFQNLLPDAMTSFSACGLIDPLCSQNLTPKHSTITATIDSQSSICATSNVGSPVSANKPEGRENHTKGATSGSSEPSDEDDEAGACEQSTNPADMKRLRRKVSNRDSARRSRRRKQAQLSDLELQVEKLKVENATLYKQFTDAXQHFREADTNNRVLKSDVEALRAKVKLAXDMVTRSSFTTLNNQLFQTQHHQMSTPQQLNTTNLRRMAHVSPTITVHGNDVSYNNGGQNSALGNLDMSFNDINEVMNDAMSCGTIWPLD

SEQ ID NO: 284089 - protein, 36 aa, Glycine max
  Clone ID: PAT_MRT3847_98558C.1.pep
TTTRTMGDPARAATVGDYLPVLLNTDGDETTAAQLG

SEQ ID NO: 284090 - protein, 198 aa, Glycine max
  Clone ID: PAT_MRT3847_98559C.1.pep
MPMACFSILSPPHPTLTLTLLPPSHSQCGGFTVRVSVALTERLSQHHKTNSIIPSTRAAANGGGFETETAVVEKPQLKTLFQASRGYPSPFGATVRDGGVNFAISSLNALSATLCFFTLSDFQNNRVTEYVPLDPLINRTGGVWHVFLKGDFRDMLYGYKFDGKFSPLEGHYFDSSHILLDPYAKAVISRGEFGALGP

SEQ ID NO: 284091 - protein, 41 aa, Glycine max
  Clone ID: PAT_MRT3847_9855C.1.pep
QKGPGGIKKISTPQNPNILKTPHTHPIGDDPITFMMTTALD

SEQ ID NO: 284092 - protein, 80 aa, Glycine max
  unsure (1)..(80): unsure at all Xaa locations
  Clone ID: PAT_MRT3847_98560C.1.pep
QXXIQSIVRSSIFGNTVXWRHFXFXNSQSXDTILLXLQXISXKXXXGSIIKXAEVSRQEPNGIVVQRSEEWGSDPTNXSE

SEQ ID NO: 284093 - protein, 111 aa, Glycine max
  unsure (1)..(111): unsure at all Xaa locations
  Clone ID: PAT_MRT3847_98561C.1.pep
KDRSCRLRWINDLKPEIKXGNFSLAEDXHTIKILHALGNKXSITTSHSLSNTTNNEIKNCWNTNIKKKLMRKRIHSTTHKPKANSLVCTPSRMMLSLRSRIDGKPTSRMRL

SEQ ID NO: 284094 - protein, 136 aa, Glycine max
  unsure (1)..(136): unsure at all Xaa locations
  Clone ID: PAT_MRT3847_98562C.1.pep
MASLVASGSSQMAPSVSVQEKGSRNKRKFRADPPLGEPNKIIPSPQHESLSNEFSAEKFEITTGHGQASASDMCSVSQDHSDGLKLDLGLSSPLPSSDVRLSQPKEELEVDEFHDADWSDLTGSPVXXXVXSNLGH

SEQ ID NO: 284095 - protein, 83 aa, Glycine max
  unsure (1)..(83): unsure at all Xaa locations
  Clone ID: PAT_MRT3847_98563C.1.pep
AXXELVXXLLXWSWXGMQVXALFTMXLSSXDXFPXEAXDLSKGSSFNXXTAXRASXXEVKKAWXRISXIFXGGXXWWEXLLLX

SEQ ID NO: 284096 - protein, 178 aa, Glycine max
  Clone ID: PAT_MRT3847_98564C.1.pep
MSRGRSDSGGWLRGCLVVFAVVSALGVCGPALYWRFKNAITLRNSHSSKLSCPPCLCDCPPPLSLFQLAPGLANLSISDCGSNDPDLKEEMEKQFVDLLSEELKLQESVTEANTRHMNITLAEAKRVASQYQREADKCIAATETCEQARERAQAILTKEKKMTLVWEKRARQMGWEGE

SEQ ID NO: 284097 - protein, 52 aa, Glycine max
  Clone ID: PAT_MRT3847_98565C.1.pep
PELRCLQICLPTNSGYCLSCQKNMPMACIYPPRFYIENTSSSDSGSYTISHT

SEQ ID NO: 284098 - protein, 543 aa, Glycine max
  Clone ID: PAT_MRT3847_98566C.1.pep
MTGQRISYGKRSHSHSDSDAGSKNKRRNPAADDSSSSLITADDTVFRYLCPVRKIGSVIGRGGDIVKQLRADTKAKIRIGDALPGCDERVVTIHSSSEETNHFDETGDLVSPAQDALFRVHQRVIAEDAREDEDDERNHVTAKLLVPSDQIGCVIGKGGQIVQNIRSETGAQIRILKDDRLPPCALSNDELVQISGEAAVVKKALFQIAAQIRDNPSRSQHLLASAVPGGYAAGGPGAGAPIMGVAPFVGAYGGYKGDTGDWSRPLYPAPRDEASMREFSVRFVCPTGNIGGVIGKGGAIINQIRQDSGATIKVDSSATEGDDCLIIISTKEFFEDSFSPTIEAAVRLQPRCSEKVERDSGIVSFTTRLLVPTSRIGCLIGKGGTIVTEMRRLTKANIRILSKDNLPKIASEDDEMVQISGDLDVAKDALVQALTRLRANLFDKERAVSGFLPVLPYLPASVDGSDGLNYDSRDGKRHGRGGYSSGYGGSSDLASGEGYGSYGNSQLGSGGGAYGAYGNYSLGRTSAYGSSQNGSSRRRNHAY

SEQ ID NO: 284099 - protein, 177 aa, Glycine max
  Clone ID: PAT_MRT3847_98567C.1.pep
MSRGRSDSGGWLRGCLVVFAVVSALGVCGPALYWRFKNAITLRNNNNKLSCPSCLCDCPPPLSLFQLAPGLANLSVSDCGSNDPDLKEEMEKQFVDLLSEELKLQESVTEANTRHMNITLAEAKRVASQYQREADKCITATETCEQARERAQAILTKEKKMTSVWEKRARQMGWEGE

SEQ ID NO: 284100 - protein, 52 aa, Glycine max
  Clone ID: PAT_MRT3847_98568C.1.pep
KLTTWLHILKNQSSSHTQVHFFSLCHISGESSNFQTQSLTPGSLPYKNIFLF

SEQ ID NO: 284101 - protein, 92 aa, Glycine max
  Clone ID: PAT_MRT3847_98569C.1.pep
RDSDRDSLSFSFSISRVFVKPKTFKKDRIRVCFLLLIASWGESGSKRRKIHLCSYSFELIALILREEEEQKGAVFCDLGVRCFLASFDDKAS

SEQ ID NO: 284102 - protein, 120 aa, Glycine max
  unsure (1)..(120): unsure at all Xaa locations
  Clone ID: PAT_MRT3847_9856C.1.pep
MQLILYFIVYGNGLYLQVKIENCSGGGVGSYSESKSDAKPHVPSIDPNEPKKKKXLVLGTGWAGTSFLKDLHASLYDVQVVSPRNYFAFTPLLPSVTCGTVEARSILAPVKWFSKPQRSV

SEQ ID NO: 284103 - protein, 168 aa, Glycine max
  Clone ID: PAT_MRT3847_98570C.1.pep
FSKKKKKKKKKKKKKKKKKKKKKKKKKKKKKKKKKKKNIFNVGYDRDRIAPADKEQQDFGQNNQLKARKKSQGKLEGKSLKEFYGSWSPSSTTSGQFQNQLVSSVIQSSPSSILGQWNELQGPETLYQDITNTYVTSSAYGNLTNTYSSMSMLPQAQSGVLMRQPLLS

SEQ ID NO: 284104 - protein, 128 aa, Glycine max
  unsure (1)..(128): unsure at all Xaa locations
  Clone ID: PAT_MRT3847_98571C.1.pep
MFDWNDEELANIVWGEVGEGDDHIVPYPEASEDLNDKKEWSQEASATKLIDXKRIEAKTDFHQGKLGSSSKLDIIEGQSASESGTNSWPDLSLSTAAKTDQGSLGAADVSKTLEATQLPRNVDKHGDH

SEQ ID NO: 284105 - protein, 646 aa, Glycine max
  unsure (1)..(646): unsure at all Xaa locations
  Clone ID: PAT_MRT3847_98572C.1.pep
MFDWNDEELANIVWGEAGESDDHIVPYPEASEDLNDKKEWNQEASATKLIEQKRIEAKTDFHQRKLGSSSKLDIIEGSSASESSTKAWPDLSLSNAATTDQGSLGEEVXKIKYKLHRKQXDVEKYAWDDITIFNVLNLILSNDDAIFGFVSLENSDVLLASKDKCNSAVCILMVSRNQAGALSNRSEPLEIKAEYVQQNDQSFSPRFKKIGNSSSHDIANAPANTFNVGYDRDRIAPADKEQQDFGQNNQLKARKKSQGKQEVKALQEFYGSWSPSSNTCGQFQNLQSSVILPSPSSILGRRYKHLRPESQNLIIRNTYVTCSAYANLTNTYSFMSTLPHAQSGVLMRQPLLSGYEASLGVMNPVSKSVDLVKPLTMTPQEKIEKLRRRQQMQAMLAIQKQQQEFSHQVPSSNKSMNEKCAIEMHSQLCDGADPEIEDLRTTLDPPTEQDDSNTISLAIDDLFVEDTILYMLQDVISKLDVNIRLCIRDSLFRLAQSAMQRNYASDTSSTNNTSREELKVAAREERSSQNRYARIADVETKTNPIDRTVAHLLFHRPLDLTGNYPDKLESPISAKIQYESKEANLEKFPMGCLPDEDMKSNQQISPQVLEAQPQDQFKNSHCRDSSENASNNDLADAGDQVLEASQ

SEQ ID NO: 284106 - protein, 166 aa, Glycine max
  unsure (1)..(166): unsure at all Xaa locations
  Clone ID: PAT_MRT3847_98573C.1.pep
MEREEDVKVGAQKFSERQALGTGAKSDKDYKEAPPAPLFEPGELKSWSFYRAGIAEFVATFLFLYITVLTVMGVNRAPNKCSSVGIQGIAWAFGGMIFALVYCTAGISGGHIKPAVTFGLFLARKLSLTRAXFYIVRQGLGAIWGAGVGKGVEGNARYECFKRGAN

SEQ ID NO: 284107 - protein, 68 aa, Glycine max
  Clone ID: PAT_MRT3847_98574C.1.pep
KCHEPGSRWKDHLSSCSSSYLDLCLIVRRFLFPSSMRLLLRLALILIGSGSHASLTDGRISEENDSLM

SEQ ID NO: 284108 - protein, 286 aa, Glycine max
  Clone ID: PAT_MRT3847_98575C.1.pep
MEREEDVKVGAQKFSERQALGTGAQGDKDYKEAPPAPLFEPGELKSWSFYRAGIAEFVATFLFLYITVLTVMGVNRAPNKCSSVGIQGIAWAFGGMIFALVYCTAGISGGHINPAVTFGLFLARKLSLTRAVFYIVMQCLGAICGAGVVKGFEGNARYELFKGGANFVSHGYTKGDGLGAEIVGTFILVYTVFSATDAKRNARDSHVPILAPLPIGFAVFLVHLATIPITGTGINPARSLGAAIIYNRDHAWDDHWIFWVGPFIGAALAAVYHQIVIRAIPFKTRG

SEQ ID NO: 284109 - protein, 87 aa, Glycine max
  Clone ID: PAT_MRT3847_98576C.1.pep
FNSVFFFFPKSLFWLQQSVPFILQFPFFIIVITTHTMISYLSFGPSWGPRRNLPGETCKNPFFWRGQPAKHPHSGLVEKNAVTPPCG

SEQ ID NO: 284110 - protein, 71 aa, Glycine max
  Clone ID: PAT_MRT3847_98577C.1.pep
NKNMFFFMCLTRIKHRLFFGLNLLLKEAPIFPQKAAQGLFFSYPHRWPSTCFYRFSQFTHKMHRFLSTIHS

SEQ ID NO: 284111 - protein, 287 aa, Glycine max
  Clone ID: PAT_MRT3847_98578C.1.pep
MESKEEDVRVGATKFSERQPIGTAAQGDKDYKEPPPAPLFEPGELKSWSFYRAGIAEFVATFLFLYITILTVMGVNRSPSKCASVGIQGIAWAFGGMIFALVYCTAGISGGHINPAVTFGLFLARKLSLTRALFYIIMQCLGAICGAGVVKGFEGNARYEMFKGGANFVNSGYTKGDGLGAEIVGTFVLVYTVFSATDAKRNARDSHVPILAPLPIGFAVFLVHLATIPITGTGINPARSLGAAIIYNRDHAWDDQWIFWVGPFIGAALAAVYHQIVIRAIPFKTRA

SEQ ID NO: 284112 - protein, 101 aa, Glycine max
  unsure (1)..(101): unsure at all Xaa locations
  Clone ID: PAT_MRT3847_98579C.1.pep
GKVYCTKAQKHCGKTXKYDIIGAGXHYQDDCADKEDQERPKQIDARLXHRIYPQYIEAEAHMETYVYKLDLDDVITPNCCMXELKISESKIALPKNTLGGT

SEQ ID NO: 284113 - protein, 66 aa, Glycine max
  unsure (1)..(66): unsure at all Xaa locations
  Clone ID: PAT_MRT3847_9857C.1.pep
ALGKGKKIDFLTRVDPFPVALLADLFGVKNEILXSNATNPMLTRLFENCKSLKNLVDEXCPFAFVN

SEQ ID NO: 284114 - protein, 84 aa, Glycine max
  Clone ID: PAT_MRT3847_98580C.1.pep
AMSHTSTGLSFQFYSYWQANSDQESMLSDETCPRAVCDNFELAKACHTKSKMMSTFVTIANVARPKPRLTFIGHLHLLKDKLHT

SEQ ID NO: 284115 - protein, 90 aa, Glycine max
  unsure (1)..(90): unsure at all Xaa locations
  Clone ID: PAT_MRT3847_98581C.1.pep
DYDQDKQSQKCECFXSQGEPRRHKNXNPFHFNSNRFHTFFRNQYGHVRVLXRFYKRSQQLQNLRHYRILEFDSKPYTLILPYHADADYLI

SEQ ID NO: 284116 - protein, 293 aa, Glycine max
  Clone ID: PAT_MRT3847_98582C.1.pep
LLVPKANAIFFCGDRVEGTGNPVIERLSNLQKLSEIIVSKFGSFTNAWVIEASAFNGPFAVYKDFIPSVNQYGEPSSYHPNGFPASTSTVSLLSNCLEEAKKVILGTQVDTKSGLSPSCSFSRSKTFILGFSKGGAVLNQIVTELGFSDIGSNANSPDVGQLMGRKFAGSEEIYVVPKTKEDLLNSISEIHYVDVGLNSAGAYLTNHDVFERISKRLMQGASELRFILHGTPRQWSDKRRDWIRNEKDKMLRLLESEAPKSGGKLKVLERFYFTDKPPSMQMHFEIIESLDAS

SEQ ID NO: 284117 - protein, 71 aa, Glycine max
  Clone ID: PAT_MRT3847_98583C.1.pep
SFSVLNIITFTYESFFGLHPLSQVLDQTNPLTQIVHERKLSYLDPGGLTGQTASFRIPDIHPSHYGCICPI

SEQ ID NO: 284118 - protein, 71 aa, Glycine max
  Clone ID: PAT_MRT3847_98584C.1.pep
DSAGRQMEHANNIALTLSHLKQANEWLEKLRSTSNLENDELVETVDRLKQKVYSCLLLHVDSAAFALENRA

SEQ ID NO: 284119 - protein, 60 aa, Glycine max
  Clone ID: PAT_MRT3847_98585C.1.pep
SEITTPSTTRSSRPKPYYAGLSIFSLLEHCLLDHHILHIILFRNPLLKPSSLTGECSFCE

SEQ ID NO: 284120 - protein, 58 aa, Glycine max
  Clone ID: PAT_MRT3847_98586C.1.pep
GHDGYIGVFSLNKVQLKLDLYLHSYYWLNILMCQSEKRNFHLIIRSHPKSNVLRLLIS

SEQ ID NO: 284121 - protein, 91 aa, Glycine max
  unsure (1)..(91): unsure at all Xaa locations
  Clone ID: PAT_MRT3847_98587C.1.pep
MAATQEEVKLLGIDGSRFVCKVQIDLKINGVEHKFLEXNLDNKTDMLVTYNPVHKKVPDDDHYEQPIADALVNVEYIDDTWKINHILPSDP

SEQ ID NO: 284122 - protein, 89 aa, Glycine max
  Clone ID: PAT_MRT3847_98588C.1.pep
SRVDPRIRTGVSTAAKGQQKGTKKNNKINGWSASLHLNTSNKIEYILYPHQLSTIANTDDLDLDSWETLYQRLSVGDNHLRSVFIRKVY

SEQ ID NO: 284123 - protein, 79 aa, Glycine max
  Clone ID: PAT_MRT3847_98589C.1.pep
FFIKNNHMADDDQFQASGNWWETSRSVRYESGASQSSSSAITNTGNNFGWQGSDMADMKPRSSMDSSSVVFHDTQNNKF

SEQ ID NO: 284124 - protein, 55 aa, Glycine max
  Clone ID: PAT_MRT3847_9858C.1.pep
EIKLIPIKICTYEMPDFIKMCNWYSQRNGDLNYFGCRIGVIRCQIMCSSYMNIFA

SEQ ID NO: 284125 - protein, 311 aa, Glycine max
  Clone ID: PAT_MRT3847_98590C.1.pep
MELEHPTATPLNSAMTYDEASMERSKSFVNALQELKNLRPQLYSAAEYCEKSYLHSEQKQMVLDNLKDYAIRALVNAVDHLGTVAYKLTDLLEQQTFDVSTMDLKVATINQKLLTCQIYTVKEGLRQQQLLAFIPRHHKHYILPNSVNKKVHFSPPIQIDARQNPFHTRTRFQSSGTPAAKTLSWHLASETKSTLKGSSHASPSPNTENPKFSAKASGVFHLLDNEENTWMKSSPAQIYFPNGVPTSSTPMHTLGGTGKDALEGSKPLTAFRSFDYQNRRETVQVPTRSKSVLSAFFVKQKTPKLKASSFL

SEQ ID NO: 284126 - protein, 86 aa, Glycine max
  Clone ID: PAT_MRT3847_98591C.1.pep
PEDDYLESSAHNTAIATALRELLNPLPAGALDEELHIRTEDAHGRDHMLLLTIPCFNRNTEHAIHLPYLCHHSGASTWLTHTVHTY

SEQ ID NO: 284127 - protein, 171 aa, Glycine max
  Clone ID: PAT_MRT3847_98592C.1.pep
QCKLDSVNKKVHFSPQIQIDARQNPFQTRTRFQSSGTPAAKTLSWHLASETKSTLKGSSHASPSPNTENPKFSAKASGVFHLLDNEENTWMKSSPAQIYFPNGVPTSSTPMHTLGGTGKDALEGSKPLTAFRSFDYQNRRETVQVPTRSKSVLSAFFVKQKTPKLKAGSFL

SEQ ID NO: 284128 - protein, 91 aa, Glycine max
  unsure (1)..(91): unsure at all Xaa locations
  Clone ID: PAT_MRT3847_98593C.1.pep
MAAKRDHAVAREARVXLFLCVLALHDVYGSITVXDVARDANLGDDELVGTDMKXRIXMNKMGRSYGTEEEYXLRSGIIVQSIVRASWSLAR

SEQ ID NO: 284129 - protein, 50 aa, Glycine max
  Clone ID: PAT_MRT3847_98594C.1.pep
HFNGAHGAFDDGLSSKQTNVDIGQDTDTQSHVLSIAQHMRLHMVSVIDKS

SEQ ID NO: 284130 - protein, 57 aa, Glycine max
  Clone ID: PAT_MRT3847_98595C.1.pep
DRLVHFRLRAMHPTPIAHPSDTRFMASLKDACFGCQAMHGSGECTDGTCSYHVPTRD

SEQ ID NO: 284131 - protein, 156 aa, Glycine max
  Clone ID: PAT_MRT3847_98596C.1.pep
REGLRGAAFGFSKIAKQAGGVLKPYLRSLIPRLVRYQYDPDKNVQDAMIHIWKSLVDDSKKTIDENLDLIIDDLLVQCGSRLWRSREASCLALTDIIQGRKFHEVGKHLKRLWSGTFRVMDDIKETVRISGEKLCRAVTSLTTRLCDVSLTDMSDA

SEQ ID NO: 284132 - protein, 374 aa, Glycine max
  Clone ID: PAT_MRT3847_98597C.1.pep
IEHQRRKVKLLSMLDEVDRRYNHYCEQMQMVVNSFDLMMGFGAAVPYTALAQKAMSRHFRCLKEAITAQLKQSCEVLGDKDGAGSSGGLTKGETPRLKMLEQSLRQQRAFHQMGMMEQEAWRPQRGLPERSVNILRAWLFEHFLHPYPSDADKHLLARQTGLSRNQVSNWFINARVRLWKPMVEEMYQQELKEAESAEEREKDQSNNISGNQAQIPTTPSAATTSTATATAPPPPPSTTTKTTKPTGKRSDTINAPESDPSQHLAMNNRQGFSENQAKKSTASTTTTTIASEVAPPVSQCFDDSDLPAHRLMASDDTCHLVTADFGTASASADIGSTLIRFGTTPGDVSLTLGLRHAGNMPEKSPFSVRDFGAI

SEQ ID NO: 284133 - protein, 37 aa, Glycine max
  Clone ID: PAT_MRT3847_98598C.1.pep
KQLQDDNRYSAGRGAHINLKRAEHARITIGKIPGLLS

SEQ ID NO: 284134 - protein, 172 aa, Glycine max
  Clone ID: PAT_MRT3847_98599C.1.pep
GEYQMFPGEEITIAKGYLSIIESLASVLPPGLVQLGRKVTRIEWQPERHEAMNLENGRPCSSRPVMLHFCDGSIMSADHVIVTVSLGVLKASIRDDDSGMLMFNPPLPSFKAEAISRLGFGVVNKLFMQLSEPPHEHSKGFPFLQMVFHSPQSELRHKKIPWWMRRTAWCRN

SEQ ID NO: 284135 - protein, 430 aa, Glycine max
  Clone ID: PAT_MRT3847_9859C.1.pep
MTNENTTGIEIDYEYEDCSNSKRPKMTSKVWEEMQRIQTTEGSKVLCRHCGKLLQDNCGTSHLKRHLIICPKRPKPLDIITQDSMPTVCFRGPSSVKDSGLNTVLMVRPLKVEPESQIPCFSQTPNIRVPTAIASIENSPSPVQELHPKTSSALLLPSIESPKNQGELTLDDVEMKAFYASLDAQTSDMSPSQDTAVITELSNSTPCEETKKALTTLKDLLCKDFSDLLHTGQSGSIKSSIEYLSKLSADDGVSAEMRLLILEVSREFTRWSCDYNDASRKIESASTNISKADKLEGNLEANKNEFKEVMSLENELSNQLSCLEKRKKELEEQINAIKANISVFQSAKVTSTKRKREVFEEAKILKVQRDELREQVPHLRNELEVAKKNQAHIRAEWSKLGEKFNKSLNEMNCEHLHGKSIEDCPQENSI

SEQ ID NO: 284136 - protein, 76 aa, Glycine max
  Clone ID: PAT_MRT3847_985C.1.pep
CPPVPVRFSRVAPRCPAFFSVPLCLGFFLFFCLLSALNSVLFGGAPVYWEAPVASRFLVSIHMLTNITRVAWRAAA

SEQ ID NO: 284137 - protein, 58 aa, Glycine max
  Clone ID: PAT_MRT3847_98600C.1.pep
KRRKLEIRDLVSHFSFYKGEKDREREGAESLWFVQFRHIKSWSKVTKFYRVIPKSFCR

SEQ ID NO: 284138 - protein, 109 aa, Glycine max
  Clone ID: PAT_MRT3847_98601C.1.pep
PCKVVLFQEKFSDVVNWLKANATKAENLAADAGVAFSGKKLLPEVINKENKPFGEKTGSTPVSTATNFTSSWSPGLFSNSQGIFGFGRSLLTFKKIYPITFLLIIQSNF

SEQ ID NO: 284139 - protein, 154 aa, Glycine max
  unsure (1)..(154): unsure at all Xaa locations
  Clone ID: PAT_MRT3847_98602C.1.pep
TSLATEAEEQAKRAHEXEKHVAHESLKDQIPAADKRDTTKEKKCAKIKNPRQRGEGDTKPQTDGKEHEGKHXPESKKSAGENHEGQIPPRAQEETPATKARDIRTAKESKNSKPQATAKQEGATEKINERNRRPDSNKEGAKAKGETEQTKTEK

SEQ ID NO: 284140 - protein, 197 aa, Glycine max
  unsure (1)..(197): unsure at all Xaa locations
  Clone ID: PAT_MRT3847_98603C.1.pep
MKINLLEKKLGLLLLVLLQILLVLGALDYFQTVKAFLDLEIKVPSDDVDGXNELEQPSSPSVKKSEEKGVAVVHEVKCKLYVKSSDPADKDVWKDKGMGQLSIKCKEGVSKATKESKPTIVVRNEVGKILLNALLYPGIKTNLQKNSLVTIFHTSGNIDGSGGDNDSVVARTFLIRMKTEDDRNKLASTIQEYAPVS

SEQ ID NO: 284141 - protein, 59 aa, Glycine max
  Clone ID: PAT_MRT3847_98604C.1.pep
NLGGRRGSYPGENFKGVPFRGVTYPATKGAPLCGATPLTPPTGAYPGDTPFSKPTRGGL

SEQ ID NO: 284142 - protein, 123 aa, Glycine max
  Clone ID: PAT_MRT3847_98605C.1.pep
AHTSVHASVFVYPFFSPIKTPTHKFSQHLHDLTHKSSSYSSVVACCSLFHLFSPSQQPPPWSKPDAAPLLSSVLSLRLLLRPTPNDPRCLRIPLWRLRSTNLEPEMNLGNRSYDPLICQIPRR

SEQ ID NO: 284143 - protein, 117 aa, Glycine max
  unsure (1)..(117): unsure at all Xaa locations
  Clone ID: PAT_MRT3847_98606C.1.pep
MDAMGDRDTVRYRGSCLITVCTYQVITERPEEANCLNVDSIFIHREXDYSLGIGFQSSTYGILMMLCGVLQLTKLHACAYQKLSTXMPLCSIANPKXVLVIDIGDGGVIKKYTPIFN

SEQ ID NO: 284144 - protein, 139 aa, Glycine max
  Clone ID: PAT_MRT3847_98607C.1.pep
GIEALSRGCSQVHFVEMDPWVVSDVLRPNLEETGFLDASVIHTVRVEKFFERAEQFVGNSGPFDYISVTPPYTQVDYGVLMRQISESSLIGENTFIVVEYPLKTDMLDSCGSLVKITDRRFGRTLLAIYGPTWSQKKRR

SEQ ID NO: 284145 - protein, 42 aa, Glycine max
  Clone ID: PAT_MRT3847_98608C.1.pep
TLCSLVTRTTYKHDIIAHTQHITLLVHPSVVFSRRTRGRTRG

SEQ ID NO: 284146 - protein, 90 aa, Glycine max
  Clone ID: PAT_MRT3847_98609C.1.pep
KGAIVSFLCGLSNQYVSKGIWVNPFAPGPVWTPLIPAPMNKKAQDQFTSPMGRPSHPSEIASCFVFLASMDSRSISGQTIPANGGVVVNG

SEQ ID NO: 284147 - protein, 69 aa, Glycine max
  unsure (1)..(69): unsure at all Xaa locations
  Clone ID: PAT_MRT3847_9860C.1.pep
FAYKHGRDNHEKTAKHVFTLGDFXKLIKXFRSRPRGGRKKTCPPVEMLIRKRVSPPSQLEHWFFMQESE

SEQ ID NO: 284148 - protein, 52 aa, Glycine max
  Clone ID: PAT_MRT3847_98610C.1.pep
QKNMAPYTSQILIITTHKTNSKNQIPYQQPIAAIYCPRICDSVIQLQKHYTC

SEQ ID NO: 284149 - protein, 132 aa, Glycine max
  unsure (1)..(132): unsure at all Xaa locations
  Clone ID: PAT_MRT3847_98611C.1.pep
RLLRPRVRPRVRFHLQPMRDQKGEEQNFIVVQLDGCQHVXPLDNCIRXNTAEEGDTIAKTYCXNVDGAVRDLAYANKKPDDLWTNTLKTDDPXPDRKDDPAWKAIQIVLVSGEQLCFKHFKAIHPYGSGDTG

SEQ ID NO: 284150 - protein, 65 aa, Glycine max
  Clone ID: PAT_MRT3847_98612C.1.pep
ITHATWRGNSDNDKDVAFVAPRTLIMTIGIFSGPFLDSCSRARWHQTDLSGVSQPLLKRTHREGP

SEQ ID NO: 284151 - protein, 74 aa, Glycine max
  Clone ID: PAT_MRT3847_98613C.1.pep
YSTGIPGSTHAYAYPCVTHAVLTTRFLTLAFGPAYKRPGQTHLLCANTFIIPSHKSKQEHSNKRFVYLNVCHAL

SEQ ID NO: 284152 - protein, 97 aa, Glycine max
  Clone ID: PAT_MRT3847_98614C.1.pep
LMRSQSLSPIKEHKRRWLETQMLPSVSVTPLMDIETNLTENCASQSQPMDLHENYLKPSMEDQLPFGTPSTQGFLQDFHHIDHQFHVNGPSVVFSQP

SEQ ID NO: 284153 - protein, 64 aa, Glycine max
  Clone ID: PAT_MRT3847_98615C.1.pep
ESQGESSDRKYLLGGEMSKMRNHGKELAYEKELCQLSFAISLSLQGLDCAKGKAWEVKRVMLFL

SEQ ID NO: 284154 - protein, 70 aa, Glycine max
  Clone ID: PAT_MRT3847_98616C.1.pep
YSYHTNYLTEWTHTRHLLSLRILCTLLLISLVATEPYKDATHAEEPTTRTDACTTAVSTLHGGCRRYGRS

SEQ ID NO: 284155 - protein, 85 aa, Glycine max
  Clone ID: PAT_MRT3847_98617C.1.pep
MDLFAEDIGQMLQGEKVLDTFPSRRLWQILQNLRALARLPKLTVDPILLHTVMIYYYTQFLPIDSLRSIGDLPTNMFFGLHRCIP

SEQ ID NO: 284156 - protein, 72 aa, Glycine max
  Clone ID: PAT_MRT3847_98618C.1.pep
MEIVHIQAGQCGNQIGAKVWEVINDEHGIYPTGTYHGDSDLQLDRISVYYNEPTGGIYEPSAILLDLEPGTM

SEQ ID NO: 284157 - protein, 80 aa, Glycine max
  unsure (1)..(80): unsure at all Xaa locations
  Clone ID: PAT_MRT3847_98619C.1.pep
SSAYEPEXALXIMDXDEDPXAXXXPXXLXXFSGAIHXPPQXAFIFXHALXRXSXGTGVFIPQATQPXRXXRKGXANNSYA

SEQ ID NO: 284158 - protein, 78 aa, Glycine max
  unsure (1)..(78): unsure at all Xaa locations
  Clone ID: PAT_MRT3847_9861C.1.pep
XHVGMXYSVTLIVGYXSQXDRIVXTPXQEYVXPKSIPIAXPSPXPAILTLHTXKSXXPXXIRISNFRXXGIKKLQQXL

SEQ ID NO: 284159 - protein, 59 aa, Glycine max
  Clone ID: PAT_MRT3847_98620C.1.pep
RTQHLDTTPFPKFAPFSAPSYWFSFLSSGVPFVLFTCDVFMIHSSTFCIYQSVMSVDLD

SEQ ID NO: 284160 - protein, 53 aa, Glycine max
  Clone ID: PAT_MRT3847_98621C.1.pep
LWMTILSKRNVLLLFFCSLLYIPMGPHSILYNSHTLYLRIWIIILLKYYPYQV

SEQ ID NO: 284161 - protein, 67 aa, Glycine max
  Clone ID: PAT_MRT3847_98622C.1.pep
IVFRYAERYDELCFHICLYNDTTSGGELILKYSNLKAIEKWMRIISRRKVYGESIQWLIHCIKPSPY

SEQ ID NO: 284162 - protein, 126 aa, Glycine max
  Clone ID: PAT_MRT3847_98623C.1.pep
IIFTFSSFSDLRIVTFSRTPVLLFFFPLNLDYSVKKKKKKKKKKKKKKKKKKKKKKKKKKKKKKKKKKKKKKKKKRKQKKKKRGGPFKEAKFYPPWGGEKIFFWGAQNIFRGGGFLNTGGWEKTVG

SEQ ID NO: 284163 - protein, 51 aa, Glycine max
  Clone ID: PAT_MRT3847_98624C.1.pep
TGLRPTCFALQVPLKIVGGVKFGCEQSGSRFVGSVVGRRGLEPFPGLRKGS

SEQ ID NO: 284164 - protein, 159 aa, Glycine max
  Clone ID: PAT_MRT3847_98625C.1.pep
KKKRGGPPPQKKTGGPQSPNQPKQLNRGDPGKNPKATIPRGGQTPPFLRYPGNKQFRVQNLGSKKNTVPKFKPKTNYIRGGDSTSTLRVFPFFPHLKIGQPRVPLKRQKQWVEIPPGTNQGKQVRGHGHPKKWFFRWPPTFEVKKKGKGVLLQTLSETF

SEQ ID NO: 284165 - protein, 115 aa, Glycine max
  Clone ID: PAT_MRT3847_98626C.1.pep
EIGKRSKEAGEGEEKTKNPGTTAEEADNKLREEHEKRAPTGDGTERPKEENTPRRKKGDKPKTRSNTKHPMEANQGGRQKTTKRGRASTKKRDKPSRQGGTNPNTREGPAGPTRD

SEQ ID NO: 284166 - protein, 49 aa, Glycine max
  Clone ID: PAT_MRT3847_98627C.1.pep
YAAHSVSDFLPPASQNNYLKLIWCSFQCYHPCKMIVHFPKGRRFFYLSN

SEQ ID NO: 284167 - protein, 41 aa, Glycine max
  Clone ID: PAT_MRT3847_98628C.1.pep
YIPKKRIPLLMDQQMQSSLLAPLISTRLKKTYSFPKNQSHR

SEQ ID NO: 284168 - protein, 78 aa, Glycine max
  Clone ID: PAT_MRT3847_98629C.1.pep
GLWIPRFPSPGLCFQNLRHGISQKGLSSLAWIHIKLHLDFDFETLLGVLLTNVFPEKRKFLLMLYEKNNEQVQCIPPL

SEQ ID NO: 284169 - protein, 66 aa, Glycine max
  Clone ID: PAT_MRT3847_9862C.1.pep
PYSSFPYFILLSSLYMITLLFLLSKACEKIGFYVLLSSSFILRKLYIISVSTKCMQLTLLSSSRSR

SEQ ID NO: 284170 - protein, 55 aa, Glycine max
  Clone ID: PAT_MRT3847_98630C.1.pep
LLICLFLLLWVQLCAKINMVYFYKCLSKLYLIDDVVLSKGHHFFICPSVNSYFIK

SEQ ID NO: 284171 - protein, 204 aa, Glycine max
  unsure (1)..(204): unsure at all Xaa locations
  Clone ID: PAT_MRT3847_98631C.1.pep
GSRASLCCLVLFLAAIILSPQAVAHYENPTVYKPPTEKPPAYKPPVEKPPVYKPSVENPPIDKPTVEKPPMSKHPAEKPPLYMPPVEKPPVYMPPAEKPPVCMPPVXKPSVYKPHIEKPPVFKSPVEKPRVYKPSVDMPPGYKPSVEKXPACMPPVEHPPVCKPPVEKPAVYKPAAEKPPDYKPPVEKPPGYKPPVINLLLQAT

SEQ ID NO: 284172 - protein, 79 aa, Glycine max
  Clone ID: PAT_MRT3847_98632C.1.pep
LIHDRLTRSEHCFQPFECYSSWCLVVVLVVALDLSAHDFGAWHGYGALKKKMKGLPPTTVWCQKRWRVVRSMMCLQGPG

SEQ ID NO: 284173 - protein, 74 aa, Glycine max
  Clone ID: PAT_MRT3847_98633C.1.pep
KRTLYKQYNNTFTKDSYLLNHFNSSISYFLHYFSSQLNNLTFHFVSHILTKCSVKLIINLHLYSLGMGGGFLAV

SEQ ID NO: 284174 - protein, 134 aa, Glycine max
  Clone ID: PAT_MRT3847_98634C.1.pep
MFGGNHVNEQQSNSNLQDLMNSFAVGGNSSIFEAGGFEAYDHSNNSNNRDPKVLAMSGSNSVGGSDRLTRDFLGVGQIVRGMSGSGGVAQREQQQQHGFNLSSLEAERNNNNNNSNNAAPSSGQAFGGGGGNFQ

SEQ ID NO: 284175 - protein, 74 aa, Glycine max
  Clone ID: PAT_MRT3847_98635C.1.pep
SYGASMHLGFAGKFMRNMYYNLRFSINAAIELGDARVLNQCCSGDVKDQQDVLMGMMVSCIRRQTAHSAAYLRG

SEQ ID NO: 284176 - protein, 68 aa, Glycine max
  Clone ID: PAT_MRT3847_98636C.1.pep
LKMAPMPTIRFCLQTLQILALDLISWFRAHVGHLYLRYLPGSPNQSAMTTTPFFTGGVAHRMTLLLEA

SEQ ID NO: 284177 - protein, 70 aa, Glycine max
  Clone ID: PAT_MRT3847_98637C.1.pep
FYSTSNVSYLLTVYACASIMKANAFWFFHISRFILSAIGRFHGLGAVFRSYLFLPCKEVPVAFVSHMVRL

SEQ ID NO: 284178 - protein, 78 aa, Glycine max
  unsure (1)..(78): unsure at all Xaa locations
  Clone ID: PAT_MRT3847_98638C.1.pep
GKEGQGRIEWDLVVENTLDRSSGRRDARSEAFDAHQSDTLTPPLALGIVVAACGIYLEREQDYNKAVCLPILKWGDDX

SEQ ID NO: 284179 - protein, 236 aa, Glycine max
  Clone ID: PAT_MRT3847_98639C.1.pep
PASAALQVLDLSNNQLSGVVPDNGSFSLFTPISFNNNLDLCGPVTGHPCPGSPPFSPPPPFVPPSPISAPEGNSATGAIAGGVAAGAALLFAAPAIVFAWWRRRKPQEFFFDVPAEEDPEVHLGQLKRFSLRELQVATDTFSNKNILGRGGFGKVYKGRLTDGSLVAVKRLKEERTPGGELQFQTEVEMISMAVHRNLLRLRGFCMTPTERLLVYPYMANGSVASCLRERPAHQQP

SEQ ID NO: 284180 - protein, 203 aa, Glycine max
  unsure (1)..(203): unsure at all Xaa locations
  Clone ID: PAT_MRT3847_9863C.1.pep
REFGPRGQEFIIGLGNEYLENMTNPYKAQTWIQQHVQPYLSQTKITCITVGNEVFNSNDTQQMLNLLPAMQTVHDALVNLGLDQQVTVTTAHSFNILSNSYPPSSGAFREDLVQYIQALLDFHAQINSPFLINAYPFFAYKDNPDEVSLNYVLFQPNEGMADPNTNFHYDNMLYAQIDAVYAAIKQMGHDDVQXRXSETGWPS

SEQ ID NO: 284181 - protein, 357 aa, Glycine max
  Clone ID: PAT_MRT3847_98640C.1.pep
MFLFQKASASHVQLLIGSKKYFQFHLPRDAVNIAEASDATIAKLVLESDPRTLSEALTKPRIHWTPELVNKTLKRLWNHGPKALLFFKHLDRHLPSYTHSPSSFDHAVDIAARMRDFNSAWALVGRMRSLRLGPSPKTLAILAVRYASIGKPHRAVRTFLSMHEHGLHQDLHSFNTLLDILCKSNRVETAHDLLRTLKSRFRPDTVSYNILANGYCLKKRTPMALRVLKEMVQRGIEPTMVTYNTMLKGYFRSNQIKEAWEFYLEMKKRKCEIDVVSYTTVIHGFGEAGEVKKAKRVFDEMVKEGVAPNVATYNALIQVFCKKDSVQNAVGGFEEMVREGGGVPRSGYFQCWYTRFG

SEQ ID NO: 284182 - protein, 131 aa, Glycine max
  unsure (1)..(131): unsure at all Xaa locations
  Clone ID: PAT_MRT3847_98641C.1.pep
MMIGVNKHAWPYAHQSLFIDAGTMVSPTVFARRSLXYLISGMPXLTTAMQAQVISPVWHTASYFQSVTLTGLGIENEAPAALKEGTTLDPNGMQLPSTNENIVQRQILADSVLPDDYPPDIDFKKNHLGYQ

SEQ ID NO: 284183 - protein, 77 aa, Glycine max
  Clone ID: PAT_MRT3847_98642C.1.pep
TESSLKIRLSALKRMPIISLILNGRIQVDLIRPNQCFSRPTLQLKKCKACIPVKIQGQSLGMFRFHTRTPHHSSLHW

SEQ ID NO: 284184 - protein, 66 aa, Glycine max
  Clone ID: PAT_MRT3847_98643C.1.pep
FDPWMEEEYIASNSNALSVMMLVGDIVVGRRSRICRRVFGYNRYMSPIQENLSLRKSVNVSGRLDG

SEQ ID NO: 284185 - protein, 140 aa, Glycine max
  Clone ID: PAT_MRT3847_98644C.1.pep
DLIPRRGAPGGRQPLNGPQNAVAAVKADEATSLNPISVPRSWIWNLNRRTVYFGTSVTTIFKGLTTQEIQQCFWSGGYICVRGFDREARAPRPLMARLHFPASKLAAKTKEKAKKESNSAKSRASKPNPEQPELIANRDK

SEQ ID NO: 284186 - protein, 66 aa, Glycine max
  Clone ID: PAT_MRT3847_98645C.1.pep
RAESARVRLREDDRRVASKLCEESHISLSSSLEQYNLPFFVVVWIRLTLEVYNWRWNGLRFMAKRS

SEQ ID NO: 284187 - protein, 120 aa, Glycine max
  Clone ID: PAT_MRT3847_98646C.1.pep
ENAASETNDAWCISTLNKLKEASPLSLKVALRSIREGRFQTLDQCLLREYRMTLQAIHRPIPGDFCEGVRARVVDKDFAPKWDPPTLEKVSQDMVDHYFLPLSESEPDLELPTNNREAFL

SEQ ID NO: 284188 - protein, 96 aa, Glycine max
  unsure (1)..(96): unsure at all Xaa locations
  Clone ID: PAT_MRT3847_98647C.1.pep
TTGSPIFXNIHISLKLKXVQYKYVQXNLMNKSXLLLKSNPFHKKVPIFIYNXKSHNXSLVILEYIYXTFNNNPILPFYPYQKTFTRFSSKFIHYNF

SEQ ID NO: 284189 - protein, 115 aa, Glycine max
  Clone ID: PAT_MRT3847_98648C.1.pep
GRGSPQHFWLPPKKISLGGKLGGQPPKSCLFVFPRPSHIPGGVGPPPFLGGSFFFLPRKKKPSPPRAKKNQPFFFFFRKQKQRKKKKQKEKKKKKKKKKTTKKKKKKKKKKKKKQ

SEQ ID NO: 284190 - protein, 108 aa, Glycine max
  Clone ID: PAT_MRT3847_98649C.1.pep
ITKDSHPQPSYSTIPFSLKFSISLPSIATGTSINPTLTLATNISVLFFSLCISLLSSLSIFCLYSALFLPLFLFSPLSALFVFCPFYLFHFFNSVTVFFLHLLSLVPN

SEQ ID NO: 284191 - protein, 54 aa, Glycine max
  Clone ID: PAT_MRT3847_9864C.1.pep
KLGFVPWPLACKSDGISIHSFLRSPAKKIPLKSPTAKLSKGTKPLPLNLKPLSP

SEQ ID NO: 284192 - protein, 102 aa, Glycine max
  unsure (1)..(102): unsure at all Xaa locations
  Clone ID: PAT_MRT3847_98650C.1.pep
CAGSHSSEDGGVXKISGRPKKIDARLRQRIDPQYNEVQAQMETNLVKLSLDDVETPKGSMVDLKISQSKIGLPINTVGGTILCTVLLLYSSTEGYSYEHALI

SEQ ID NO: 284193 - protein, 55 aa, Glycine max
  Clone ID: PAT_MRT3847_98651C.1.pep
LQKIFISYYGGKTEQHLGNKRKIENKGPGNLYARLKKGQPILASILWSKLCPKNI

SEQ ID NO: 284194 - protein, 127 aa, Glycine max
  Clone ID: PAT_MRT3847_98652C.1.pep
SPLMLVSDLQSELARPPISDDTTTHPSLRTLVIRLEYGCEKTTEGGASRTWTTSSRAGTHAHLYLVPHHLQPGQSSHSSLSFLFLCSVYFCSLHTYWNIVLCLIITDAGYECCRVLRDFLDVIGWRS

SEQ ID NO: 284195 - protein, 34 aa, Glycine max
  Clone ID: PAT_MRT3847_98653C.1.pep
VVERLAVYTSALIVETELGLTAVLAVLILRQNIT

SEQ ID NO: 284196 - protein, 187 aa, Glycine max
  Clone ID: PAT_MRT3847_98654C.1.pep
TVWWGIALNMIAYFVASHAAGACWYLLGIQRAAKCLKVQCAKTSGCGMKILSCQTPIYYGSNSLLVRDKARLAWAENREVRHTCLNGPDSYNYGAYRWTVQLVTNDNRLEKILFPIFWGLMTLSTFGNLESTTEWLEVVFNIIVLTSGLLLVTMLIGNIKVFLHATTSKKQAMQLKMRNIEWWMRKR

SEQ ID NO: 284197 - protein, 98 aa, Glycine max
  Clone ID: PAT_MRT3847_98655C.1.pep
QFSFQISVHLIVGRLGKDIIKFINLGNPLESWKNHPRNVLGIVKPKNVVVCPSKTLVLMPNNESKMFNIVPKRKVNYGVGPKKKTPPPKKKKKKKKKK

SEQ ID NO: 284198 - protein, 155 aa, Glycine max
  unsure (1)..(155): unsure at all Xaa locations
  Clone ID: PAT_MRT3847_98656C.1.pep
PRXRGLCSDAWVYFYSSSSFLMCLVSKLNLCRAISMAKFIMNRDVLTYMKAFIFSLSIAVAFQRCLVLLYHVSKFCSLLCQTEVYQCIIWSRYLNSCISNRSVPSLFYILFLHIGNHCFKKISYTSLFFYLNHTHSTLKNIKSREVHRKEVSFSN

SEQ ID NO: 284199 - protein, 122 aa, Glycine max
  unsure (1)..(122): unsure at all Xaa locations
  Clone ID: PAT_MRT3847_98657C.1.pep
CRPARRLSLSRPLVLNRLRPLDRGGGKAQPGSPWRRSKRYRCIRGRLXKASANTLSKTSRHATDGGRRPFLRTRRMDPACNCSRSLASRAEHRSQTIIRQALHRKEKRKEYLLYYNRFSQCN

SEQ ID NO: 284200 - protein, 308 aa, Glycine max
  Clone ID: PAT_MRT3847_98658C.1.pep
MGEKDDGLGLGLSLKLGWGENNDNNNNQQQHPFNVHKPPQSVPNQRVSVNSLFHFHDRSSEMRSFFRGIDVNLPPPPPSAALAAFDDENGVSSPNSTISSINGKRSEREGNGEENERTSSSRGGGGSDDDEGGACGGDADADASRKKLRLSKEQALVLEETVKEHNTLNPEQKQALAKQLNLMPRQVEVWFQNRRARTKLKQTEVDCEYLKRCCENLTEENRRLQKEVQELRALKLSPQLYMQMNPPTTLTMCPSCERVAVSSASSSSSATMPSALPPANLNPVGPTIQRPMPVNPWAAMLNQHRGRP

SEQ ID NO: 284201 - protein, 80 aa, Glycine max
  unsure (1)..(80): unsure at all Xaa locations
  Clone ID: PAT_MRT3847_98659C.1.pep
MXYIHHGRTVSGTYSDSEPPPGGLKLRQIAIAXCIPLXFPYLXNVVFFSXGDNTQELPQKWNATXXGAKRGCXXASTPRX

SEQ ID NO: 284202 - protein, 47 aa, Glycine max
  Clone ID: PAT_MRT3847_9865C.1.pep
SENVFPRFASKGRDMEEHHLLLLFPPPEFITAPLLRRLLEHLVSRLR

SEQ ID NO: 284203 - protein, 48 aa, Glycine max
  unsure (1)..(48): unsure at all Xaa locations
  Clone ID: PAT_MRT3847_98660C.1.pep
TVIAQLVKLMLFSPHSSSYKQIASFEYQYISWLFFWVXXKKKKKKKKK

SEQ ID NO: 284204 - protein, 115 aa, Glycine max
  unsure (1)..(115): unsure at all Xaa locations
  Clone ID: PAT_MRT3847_98661C.1.pep
LNHDDYTMPLLSIQVTELVDADFIGCSMNHVIGHATDVPIDNRWFPKDCAPPINLPFKHHDEIISRYETPLLRXRSYHFSAESIAKLKAEANSESNTPKICSFQSLSALVWRSNL

SEQ ID NO: 284205 - protein, 74 aa, Glycine max
  unsure (1)..(74): unsure at all Xaa locations
  Clone ID: PAT_MRT3847_98662C.1.pep
TFTHATIPPRTLNAAPPTPKTTPSTAKPTPSTPKSTPTTXQSATSCPNDTLKLGSCAHLLGLAYIIDGTPPSNP

SEQ ID NO: 284206 - protein, 49 aa, Glycine max
  Clone ID: PAT_MRT3847_98663C.1.pep
KSIYMCFFLTCTKTTIFSSICFFPLLSRWCRPHSNMVIKYLFRKTTFCA

SEQ ID NO: 284207 - protein, 36 aa, Glycine max
  Clone ID: PAT_MRT3847_98664C.1.pep
TVVKKRQKGTTFQNTNSCVGTITFVAVICSFELWGA

SEQ ID NO: 284208 - protein, 72 aa, Glycine max
  Clone ID: PAT_MRT3847_98665C.1.pep
PIQSPPKGLVSGRQPRRLKRHSTLYGTKTPIAKGKAASQQSPDDFLMNNRRNINYEGACPLIHIYMAPAYAS

SEQ ID NO: 284209 - protein, 73 aa, Glycine max
  Clone ID: PAT_MRT3847_98666C.1.pep
VVGRPVTAQKYKEITSPILSPDPTTNRDVHFLKYPIYVRVNSGSRHLYLSASKSNNNVYNATTCGMVQHLLQY

SEQ ID NO: 284210 - protein, 54 aa, Glycine max
  Clone ID: PAT_MRT3847_98667C.1.pep
YHTHTTTRFICLWWEPIAMGFQTSNNSHLLLYPLICQRHIILLIDIEPLSLPHN

SEQ ID NO: 284211 - protein, 97 aa, Glycine max
  Clone ID: PAT_MRT3847_98668C.1.pep
SLSFEVASEVLSVIPFDPCLLDFCSSGGIACLSFWGRSFEYWLLGPTPCFCAKISFCIKSIQAVPLSSTSRSSLLGFGVIISFEHFMYCRKRFLFYA

SEQ ID NO: 284212 - protein, 96 aa, Glycine max
  unsure (1)..(96): unsure at all Xaa locations
  Clone ID: PAT_MRT3847_98669C.1.pep
PEEHIVAAVGRGHLRVALMLPTDEDIDACYSXVTAVDSLKQGSLLYSALTKCWTAENCQTMIPRPKPDYQYGDGGHIKTPIVVAAPKHVEHLIDWI

SEQ ID NO: 284213 - protein, 65 aa, Glycine max
  unsure (1)..(65): unsure at all Xaa locations
  Clone ID: PAT_MRT3847_9866C.1.pep
XEQQTWLNXXXXLQXWXRXXXSXHXXXGXSXGIRXXDGAYRHPAMYXRXSXGNXRMLXAAXCDAQ

SEQ ID NO: 284214 - protein, 50 aa, Glycine max
  unsure (1)..(50): unsure at all Xaa locations
  Clone ID: PAT_MRT3847_98670C.1.pep
XXHGKNIWVILHNILNRGAYPENRLTRPMREVILPKGLWEALPTLVSRGF

SEQ ID NO: 284215 - protein, 120 aa, Glycine max
  unsure (1)..(120): unsure at all Xaa locations
  Clone ID: PAT_MRT3847_98671C.1.pep
MESVPNPNNGEEPTSWDELYNINLMPSELFLKFRKELQGIRVGLNMEFYNAPVNEYQAKLVLKPLTPEXRHGTGWKWKLTTCLGGDGIXRIRNKTSVGLYPGCDIRFGWRADYVLPKITA

SEQ ID NO: 284216 - protein, 62 aa, Glycine max
  Clone ID: PAT_MRT3847_98672C.1.pep
MELRKSFICHWVFLFVIVFVQVVNGFYLPGSYMHTYSNKDLIYAKVNSLTSIETELPYSYYD

SEQ ID NO: 284217 - protein, 151 aa, Glycine max
  Clone ID: PAT_MRT3847_98673C.1.pep
MSAKCSQIRHIVRLRQMLRRWRNKARMSANRAPPSDVPAGHVAVCVGSNLTRFVVRATYLNHPVFKKLLLQAEEEYGFTNHGPLAIPCDETLFRDVLRFISRSDPAKSNRFLNLELDDFQRHYCHVGISNNLDFWPESRPLLHGPTDKTIW

SEQ ID NO: 284218 - protein, 493 aa, Glycine max
  unsure (1)..(493): unsure at all Xaa locations
  Clone ID: PAT_MRT3847_98674C.1.pep
MGAGCSKLCLCWCPSNSKPNLHDLPDNENEKEESWVGFTEFTLDQLRSATSSFSPDNIVSEHGEKAPNVVYKGRTEDDRLVAVKRFNKSAWPDPRQFLEEARAVGQLRNERLANLVGCCCEGEERLLVAEFMPNETLSKHLFHWESQPMKWAMRLRVALYLAQALEYCSSKGRALYHDLNAYRVLFDQDGNPRLSCFGLMKNSRDGRSYSTNLAFTPPEYLRTGRITRESVIYSFGTXLLDLLSGXHTPSHALDLIRGKNFLMLVDSCLEGHFENDEDPKLSXFAPRRIQKDASGNRKILALATALSPRQRGTSVPSKVFMGRPDRAXSSKETVXLTPFGDACSRRDLTSIDGILEXVGYKDDEGLTNELSFQLWTNQIQETLNSKKQGDSAFHARDFSRAIDSYTKFIDGGTMVSPTVYARRCFCYLMIYMAQEALGDAMQAQSVSPTWPISPTWPIAFYLQAVALFSLGMDHDAEESLKDATTLETRKHRN

SEQ ID NO: 284219 - protein, 46 aa, Glycine max
  Clone ID: PAT_MRT3847_98675C.1.pep
IVLKSTCSLLPLYTTLHVVFQLQLVSKTFHYFAETINDWECFLPSY

SEQ ID NO: 284220 - protein, 46 aa, Glycine max
  Clone ID: PAT_MRT3847_98676C.1.pep
GKSVNVVSPDYSLAIGWRDRRLGPWLDMAEKVLAYVDHCCIALTVT

SEQ ID NO: 284221 - protein, 125 aa, Glycine max
  unsure (1)..(125): unsure at all Xaa locations
  Clone ID: PAT_MRT3847_98677C.1.pep
MDVAEPHFKSKADAGACTTYPNQAGTILHNSYIVINGRPCKDVRXPTYKTGKHGHAKRHFAGIDIITAKKLEDIVHSTDNCDAPYVNRTHYQLIDIPADGFFILLTENGDTKDDLKLTTDESMLT

SEQ ID NO: 284222 - protein, 47 aa, Glycine max
  Clone ID: PAT_MRT3847_98678C.1.pep
KNKILALDIPKCFYFIFFISRKQCTKKNTCIRLFHWIEFLQSDSSFF

SEQ ID NO: 284223 - protein, 52 aa, Glycine max
  Clone ID: PAT_MRT3847_98679C.1.pep
MAGLPARIRLQPTDVKAAALWGVTAVTGALYLVQPWGWLKKTFLEKPDPEQK

SEQ ID NO: 284224 - protein, 125 aa, Glycine max
  Clone ID: PAT_MRT3847_9867C.1.pep
NWPAAISFWSGSNGTLTYEPRIHATWKRSCWFRAPNQLQLPPNSSTIFCISLSKPSSHCTLTLSNTMADSLSSSFCKERPTWGSACCCRNEPLLLSQAMNVFKTKDDDFGTRFFSLPSFSNRFRP

SEQ ID NO: 284225 - protein, 37 aa, Glycine max
  Clone ID: PAT_MRT3847_98680C.1.pep
NSSAPLSSHPGSSVSFWQVNLFSSFPMRLPSVCFSQP

SEQ ID NO: 284226 - protein, 84 aa, Glycine max
  unsure (1)..(84): unsure at all Xaa locations
  Clone ID: PAT_MRT3847_98681C.1.pep
SAIATLKHLYYKKNYSFNSSQTENSKYLSSKQALFNLAQLLQYHQDSLHAKLNITXTEYPCFIFHTSYTTTLNTXLRLKFPHLT

SEQ ID NO: 284227 - protein, 94 aa, Glycine max
  Clone ID: PAT_MRT3847_98682C.1.pep
KKTPHSSMHRINYLQNTKVTPLQYPQKNNLFFKTLLTNFKPPLLNPGRYPPPHFTETELGVGGGPHSGIFFKNQTQEPPLPRFPYLENFNLFHT

SEQ ID NO: 284228 - protein, 77 aa, Glycine max
  unsure (1)..(77): unsure at all Xaa locations
  Clone ID: PAT_MRT3847_98683C.1.pep
HNFLLTLVQIHLHRAXFTSCLPCYYEVLLTCLKNHHRPSYGIFYLPLYQNLLTLVQTQHHLALLTFCLPFCRLLAAV

SEQ ID NO: 284229 - protein, 84 aa, Glycine max
  Clone ID: PAT_MRT3847_98684C.1.pep
LFLFLLLNFLNLATTEAQDESSTPVELSHACYVGKSIASSAFQINVRALLSSLSSNAPGDNGFYNTTVPALNPSDSVFGLFMCR

SEQ ID NO: 284230 - protein, 55 aa, Glycine max
  unsure (1)..(55): unsure at all Xaa locations
  Clone ID: PAT_MRT3847_98685C.1.pep
IRGASYDLAKNDPXKEPFEVFPEYAFQDIADWERPFIQDRGRTLSGICHLRFLLI

SEQ ID NO: 284231 - protein, 63 aa, Glycine max
  unsure (1)..(63): unsure at all Xaa locations
  Clone ID: PAT_MRT3847_98686C.1.pep
FLCEFVDRDNGDSLIKMNVLVFFFATIFVAWQCHAYDMFSSLMNTVYXSRTLDVKCSIFTLAF

SEQ ID NO: 284232 - protein, 86 aa, Glycine max
  Clone ID: PAT_MRT3847_98687C.1.pep
KQYQCIILMNSKYSLCIEAEMLSFHHLMKYHLGRTMDPPKLRNKTISVISHWQIKKKTNIPHCSKQSTVIVNLMDKKVQRSKNCPC

SEQ ID NO: 284233 - protein, 47 aa, Glycine max
  Clone ID: PAT_MRT3847_98688C.1.pep
GGGTRHTSIFLTFHERFYSYTKCSSCITTNLIMKVYLLGSLKPRSKP

SEQ ID NO: 284234 - protein, 73 aa, Glycine max
  Clone ID: PAT_MRT3847_98689C.1.pep
SGTMSPLPCCRQGPHYLKHCTAILPILAWRRDLSWRSLNKFTLTMRFGLSVSSIPEGHRHLSQPPRVIPIVLR

SEQ ID NO: 284235 - protein, 59 aa, Glycine max
  Clone ID: PAT_MRT3847_9868C.1.pep
SGAMNTSVSLMVQQQLCSSYQKMDAAKVKMTGVNTLRFSQRIEGVDNPQHLESQGCLAL

SEQ ID NO: 284236 - protein, 402 aa, Glycine max
  Clone ID: PAT_MRT3847_98691C.1.pep
MYDIHQRSHWAWSARSEHSLSADSSTNGSQDVFPRERSHQTFDMEVERLKAELAALARQADVSDLELQTLRKQIVKESKRGQELSKEIISLKEERDALKLECDNLRSFRKPTRPAKVSSRPPLDSGDLCTLVEEIRQELKYEKELNANLQLQLKKTQDANSELVLAVQDLDEMLEQKKRETCSLSNKHEEGKNSYELGSKLSNCETDDEEQKELEELVKEHSNAKETHLLEQKIIDLYGEIEMYRRDKDELEMQMEQLARLDEILKQENHDIAYKLEQSELQEQLKMQYECSSPPPAVDDVEAHIQNLENQLKQQSEEFSNSLATIKKLETQISRLEEELEKQAAGFEADLDAVTRDKVEQEQRAIRAEEALRNTRHKNANTAERLQEEFRRLSTQMASTFD

SEQ ID NO: 284237 - protein, 202 aa, Glycine max
  Clone ID: PAT_MRT3847_98692C.1.pep
MASLSTLLPNPNLISKHNSTLSSTHPCAYSWKNKTPTSKGRFSVSCSSSSQAYDVVVVGAGVIGLTIARHFLVSSDLSVAVVDKAVPCSGATGAGQGHLWMVNKTPGSATWDLASRSHQLWKTLVQSIEEQGLDPMVELGWKQSGSLLIGRTDAESDVLKGRVKLLCEAGLKAEYLCSSDLIKEEPDLLVDKDSAAAFLPDD

SEQ ID NO: 284238 - protein, 64 aa, Glycine max
  Clone ID: PAT_MRT3847_98693C.1.pep
IKSFILLLLLIKNSFLNEFLSIIPTSIIIYSFFLCIYIIELKLRFYQIFLFTFFFFKKKESSNY

SEQ ID NO: 284239 - protein, 61 aa, Glycine max
  unsure (1)..(61): unsure at all Xaa locations
  Clone ID: PAT_MRT3847_98694C.1.pep
VILHLYPFLKGLMGRQNRTPXTIVVLWSIVLAIIFSMIWVRIDIFLPKQTGPALKQCGIRC

SEQ ID NO: 284240 - protein, 62 aa, Glycine max
  Clone ID: PAT_MRT3847_98695C.1.pep
MFEPCMSASGHRGVCPVHQLLGKDVDDETPRSLVTLALDLPTDEDSRTVAAKILNCHAPPKL

SEQ ID NO: 284241 - protein, 51 aa, Glycine max
  Clone ID: PAT_MRT3847_98696C.1.pep
RFSSKPRMSTIYNMEGNRNKILKCHWKRTDTWRRISIHDFDGNNSPFGLLL

SEQ ID NO: 284242 - protein, 136 aa, Glycine max
  Clone ID: PAT_MRT3847_98697C.1.pep
PKKQRSGPSPFLLIKEKKKCPPQKKLSPLSFFELVGPIPCSSPPNNLWGKNRAPFFKVCYFIFFYPKGVFHSALNISWGHFLVLLVPQYAISHIFPPNLSKNIFLRASLFYIISFFSLSVSFFLIFFTNKKKFFPG

SEQ ID NO: 284243 - protein, 55 aa, Glycine max
  Clone ID: PAT_MRT3847_98698C.1.pep
FEILKKLVRCFAIGDCYLGDSSDYVFLYLYFDLLFLEEGGFSLWTSCSIKCSNSS

SEQ ID NO: 284244 - protein, 97 aa, Glycine max
  Clone ID: PAT_MRT3847_98699C.1.pep
TNHVVTAIAVMSPASIRCDAIDCFVLRYPWVVTIQSLCSLSALYGCDCIARANYTFVFVPAVLLHFYIISIMGQLSYLSTPSLIMLLFSPTLFPGFA

SEQ ID NO: 284245 - protein, 71 aa, Glycine max
  Clone ID: PAT_MRT3847_9869C.1.pep
YPSKHLCSFDNNYKLNGFNSLTRISKFYTILQPHFRPNPLVYTVVLYNILKTSFHFYNNYCFHFNKVNLNT

SEQ ID NO: 284246 - protein, 94 aa, Glycine max
  Clone ID: PAT_MRT3847_986C.1.pep
VIESLPYVGAMAVSNLEARQSLVPLGSVEELLTAYDSQRRELPPPVIVWEWGWTKSAETWNGRAAMLAVLLLLFLEVTTGEGFLHQWGILPLFR

SEQ ID NO: 284247 - protein, 198 aa, Glycine max
  Clone ID: PAT_MRT3847_98700C.1.pep
MTAGGCSAGISPPAGHSSKPLLSPDDALRWCRVRRERMPVSVVFLLALLNLLFSCQVKSISLSVSFASSERAKMWLVKPSSGPSSAPVPSPSYHGPHVTPRPRHHYHHRHHHSMRPYVAAPPPSKDQACDQTCTDPLTSSPFGSPCGCVFPMKIRLTLDVAPYAVFPVMTELENEIALGTYLEQSQVKIMGATADSQN

SEQ ID NO: 284248 - protein, 81 aa, Glycine max
  Clone ID: PAT_MRT3847_98701C.1.pep
RPRVRLAPRASVGGQIGPFDFQKRPNIGAYLDDKKLHYQKTGANLNSNKDGLLHPGYFGHPSNLGFVPQNSSSPLCRPVLS

SEQ ID NO: 284249 - protein, 132 aa, Glycine max
  Clone ID: PAT_MRT3847_98702C.1.pep
QVPPPGVLEKKRGGFWRVVFGHKKERLLVFFPPGTPGKGGGFFFLSPPPYWRVGSLWTPPQFVPVQEKVGFFLGVSKLGVFPGPTRCEGLFGPPFGHENFPSLFTPLIAGGFQLFVFPGRTLGKKKKKKRGG

SEQ ID NO: 284250 - protein, 136 aa, Glycine max
  unsure (1)..(136): unsure at all Xaa locations
  Clone ID: PAT_MRT3847_98703C.1.pep
AAANDGGNPTGMGGHHLXAELGVCVGAAIVLILFLISVWLAFKRSKTNPVSIPDVSKEIQEIRLDHAPNLNPTLQPEPPLSEPDPVPPTEEETTPLGYHRIQFEIGKNHRISYPERPVRSSSNDPNNCEGQVPTVI

SEQ ID NO: 284251 - protein, 127 aa, Glycine max
  Clone ID: PAT_MRT3847_98704C.1.pep
MNCSSAAMLMLLMTIFTVLSNVNEVAAEEHELVSRIKRNGYGYSSGYGGGCSACQSSCTTCGYTSYHTVPAAPVPPPPPPPTPSPAPVYRQSSYSSCSTCGGSSYSSYPSSSYSSYPASSSCYSCYP

SEQ ID NO: 284252 - protein, 126 aa, Glycine max
  Clone ID: PAT_MRT3847_98705C.1.pep
VACRVVARIRLEFFFFFFFFFFFFFFFFFFFSKETPVNRGGRRDQNWPNEKTVTYKPNISHSKMGYPQGPKKNIQPQRGPKPPKNIQKLGQGFVWTQSQKNKGASKKGKPPGRCLLKKNSKAKKNN

SEQ ID NO: 284253 - protein, 62 aa, Glycine max
  Clone ID: PAT_MRT3847_98706C.1.pep
NSYSKNHRIGVSRGFGISRIYIIPRIGKVKKSGMFEGKVALVIGPLTAAPFRRRNAPVRTRG

SEQ ID NO: 284254 - protein, 108 aa, Glycine max
  unsure (1)..(108): unsure at all Xaa locations
  Clone ID: PAT_MRT3847_98707C.1.pep
ISRRLWSRRRGRTGGIRLTINGHYCSNLVRITNGGRAADMHSGSSNGSRTDWMPMQRNWRXNWHSTCYLDGQSLXFKGTTRGCGTYRCNNVGPCGWDFGQTYTGAQCR

SEQ ID NO: 284255 - protein, 138 aa, Glycine max
  unsure (1)..(138): unsure at all Xaa locations
  Clone ID: PAT_MRT3847_98708C.1.pep
ALSMISSPADTTINRAGAGLDAPFTGLKYMAGFPTRKTNNDLTSIASNGGRVQCMHVWPPVGKKKYETLSYLPDLDDAHIGKRQSNTLLRNGWIPCLEYALDHGFMYREHNMSPGYYDGRYXTMRKLPMLDCTVASKE

SEQ ID NO: 284256 - protein, 60 aa, Glycine max
  Clone ID: PAT_MRT3847_98709C.1.pep
KELFLFLPISIFTKLSEFIKVKIAFSAFDASAVLPDLTHHSILLLLLHSDFCGVCLIFRK

SEQ ID NO: 284257 - protein, 139 aa, Glycine max
  Clone ID: PAT_MRT3847_9870C.1.pep
MASLLQCSMPLVSLSNRALVPGTRISNPSSVSLSIKGRSFPSVTLQPRGRRFQLRCAAKPETVKKVCDIVKKQLALPDESAVTGESKFAALGADSLDTVEIVMGLEEEFGITVEEESAQSITTVQDAADMIDKLLETKA

SEQ ID NO: 284258 - protein, 134 aa, Glycine max
  Clone ID: PAT_MRT3847_98710C.1.pep
MAFQDFDLISERRRNEKRQKARKRIMIGVVSSVVLVAMIGAVLFVVVRNDNEAGNKKSNENKSHGHSQQSTTPGKDHVVAHSKMVKLVCSSADYKEKCEDPLNKAMDDDPILTQPKDLPQAYVKFAEDEVSKAS

SEQ ID NO: 284259 - protein, 39 aa, Glycine max
  unsure (1)..(39): unsure at all Xaa locations
  Clone ID: PAT_MRT3847_98711C.1.pep
XSLFSXATYFXYQQWXSTLXXPLXVXXLXXQYTLLHXXW

SEQ ID NO: 284260 - protein, 81 aa, Glycine max
  Clone ID: PAT_MRT3847_98712C.1.pep
IFNSLGSGSCVCFCVKTKGLKEYLSIPVFPNPCRYVNPKGVGFPKKTKVLLSKITPFKSKVEVIEGEAMEESQSFLRKIGV

SEQ ID NO: 284261 - protein, 122 aa, Glycine max
  unsure (1)..(122): unsure at all Xaa locations
  Clone ID: PAT_MRT3847_98713C.1.pep
DKNIDISSDKRALQKLRREAXRVKRALSTQAQARLEIESLLDGEDFTESLSRARFEKLNEDLFKKTLGPVEKVMKDADLKKSEVDEIVLVGGSTRIPKVQQLIKDYFNGKEPSRGVNPDEAV

SEQ ID NO: 284262 - protein, 84 aa, Glycine max
  Clone ID: PAT_MRT3847_98714C.1.pep
PAVGQGLNKAAEVVLVLDSEILKSKEGKKKKKKKKKKKKKKKKKKKKKKKKKKKKKKKKKKKKKKKKKKKGGAFLKNQILLPGL

SEQ ID NO: 284263 - protein, 514 aa, Glycine max
  Clone ID: PAT_MRT3847_98715C.1.pep
MANNAAACAERATSDMLIGPDWAINIELCDIINMDPGQAKDALKILKKRLASKNPKIQLLALFVLETLSKNCGESVFQQIIERDILHEMVKIVKKKPDLNVREKILILIDTWQEAFGGPTGVYPQYYAAYNELKSAGVEFPPRDENSVPFFTPAQTQPIIHSAAEYDDATIQASLQSDASDLSLLEIQNAQGLADVLMEMLSALSPKDREGVKEEVIVDLVDQCRSYQKRVMLLVNNTTDEQLLGQGLALNDSLQRVLCRHDDIVKGTADSGAREAETSVLPLVNVNHEDDESEDDFAQLAHRSSRDTQAQNQKPAYDKAEPGRINPLIPPPPASKKPVYSGTGMVDYLSGDTYKTEGSPENSEPTSFTAPLHSSPNPTSSTIPSLSSSRPHAVSTTSSPIFSSEPVYDEQPSSEDKSSECLPAAPWDAQSPGIIPPPPSKYNQRQQFFEQQGVSHSSSGSSSSYDSLVGQTQNLSLNSSTPTKQQKPEDALFKDLVDFAKSKTSSSSKPNRSY

SEQ ID NO: 284264 - protein, 40 aa, Glycine max
  unsure (1)..(40): unsure at all Xaa locations
  Clone ID: PAT_MRT3847_98716C.1.pep
CFQSYLNXXTHSSXXXLHFXQTCGXIKFPXKDGXXXKNXA

SEQ ID NO: 284265 - protein, 155 aa, Glycine max
  Clone ID: PAT_MRT3847_98717C.1.pep
LNKKIFVGTGDIGVFCHTKKHVTEPQEFHFATDERIPPPAAMADLFGKLSLKSEPARNHNPIPRNTTPNPFHLHTEERGAEKEKKLVVDLLQKQWEEENARIPKANPYPYTTDYPVIPPKPEPKQCTRPEPFQLESLVRHEEEMQKEHEERRRME

SEQ ID NO: 284266 - protein, 123 aa, Glycine max
  Clone ID: PAT_MRT3847_98718C.1.pep
FFFFFFFLSELNSYFRLPARQNHSFSRGESKFIALSLATQKLGKGPPCQTKWTGKTWASPNLRGWKREPLPPGGQKEEGPERIGVRHLPRPIKEKGEGPGTPPINPPRGGGITAGGPPSFPFP

SEQ ID NO: 284267 - protein, 116 aa, Glycine max
  unsure (1)..(116): unsure at all Xaa locations
  Clone ID: PAT_MRT3847_98719C.1.pep
KRIPFEGTFRGLESPAFGLGLTHNRTGKSEGFDIKLVIALKVXITSWLGGVHGQKQGWGQPFQGNPVRNWNVLSTVCLGMEVFGHFGFPITRGDFLGGATLLGQNLFPPGFALGKI

SEQ ID NO: 284268 - protein, 140 aa, Glycine max
  Clone ID: PAT_MRT3847_9871C.1.pep
MASLTQTFMSLASLPNLVMVPGTRISHPSSVSLSIKEGRSFPSVTLQPRGCRFRFRCVAKPETVKKVCHIVKKQLALPEESSVTGESKFAALGADSLDTVEIVMGLEEEFGITVEEESAQTITTVQEAADMIDKLLETKA

SEQ ID NO: 284269 - protein, 71 aa, Glycine max
  Clone ID: PAT_MRT3847_98720C.1.pep
HASALPCLWRCTALRECLLPPKTDRGAFLAPDLAATHLTFDDTPTLEDLTVEDEDKVRCCITSYQRRRCPT

SEQ ID NO: 284270 - protein, 43 aa, Glycine max
  Clone ID: PAT_MRT3847_98721C.1.pep
EFPARPTRPPTRPEVVYLNSPSSFPFLLKSFCYCFKEPAVLQF

SEQ ID NO: 284271 - protein, 71 aa, Glycine max
  Clone ID: PAT_MRT3847_98722C.1.pep
PPPKFFFLILKKPREWKGPPPFLGKIFFFSLIPVFWGPSHKTYLPSSYKKIKKLAGSKIQLENRGGKAQSC

SEQ ID NO: 284272 - protein, 157 aa, Glycine max
  Clone ID: PAT_MRT3847_98723C.1.pep
GLKNKREVWRVKLTVAKIRKAARQLLTLDEKDPRRLFEGDAILRRLHRLGVLEESKNKLDYVLGLKIQDFLQRRLQTQCWKLGLAKSIHHARVLIRQRHIRVGRQLVDIPSFLVRVESQKHIDYALTSPFGGGRRGRVFRKKQNKGSGDGEDAADEE

SEQ ID NO: 284273 - protein, 47 aa, Glycine max
  unsure (1)..(47): unsure at all Xaa locations
  Clone ID: PAT_MRT3847_98724C.1.pep
GXXGXGGXIRXKLPRXNPYXXXLEXEDFLKXMXAPDXLRVPXXSPQX

SEQ ID NO: 284274 - protein, 61 aa, Glycine max
  Clone ID: PAT_MRT3847_98725C.1.pep
FVLFPPNDIGLIVDILGRMSYGCSLRYQPHEKDLLEGNFSSDIKTLSRSEKVSLPKASICL

SEQ ID NO: 284275 - protein, 135 aa, Glycine max
  Clone ID: PAT_MRT3847_98726C.1.pep
GLKLVKLRGEAMQDASDAASSAMVSIIGLDSEKVQLLCDAANDEVDEKDRVQIANFLCPGNYAVSGGVKGVEAVESKAKSFKARMTVRLSVAGAFHTSFMEPAVSRLEAALAATDVRTPRLPVISNVDARPHTDP

SEQ ID NO: 284276 - protein, 160 aa, Glycine max
  unsure (1)..(160): unsure at all Xaa locations
  Clone ID: PAT_MRT3847_98727C.1.pep
PLTSFVDAYNKLIIELEKSAPTLVGIECPKDDKLPXWKIFDKPMTRCFTILPMEFNLEVRXTFFNFVRFIVKKRDMLSCQVGINPYSMEWTGLSNRLRGNGIYVLRCEYATFDGLITKQVLSKKADMMNSLCGGDEKLMRERTHLLLAWCLWMAICKKDI

SEQ ID NO: 284277 - protein, 68 aa, Glycine max
  unsure (1)..(68): unsure at all Xaa locations
  Clone ID: PAT_MRT3847_98728C.1.pep
MAASVSTVGAVNRALLNLNGSGAGASAPSSXFYGTSLKKAIASRSPISKASGGSFKIVAVEDVIEIDE

SEQ ID NO: 284278 - protein, 64 aa, Glycine max
  unsure (1)..(64): unsure at all Xaa locations
  Clone ID: PAT_MRT3847_98729C.1.pep
KIEILEFGHDTRVQEGRNTXRIVIHVLRSFLQLDLQHDTNISYPCLFYNMITSIQYMNATLILS

SEQ ID NO: 284279 - protein, 92 aa, Glycine max
  Clone ID: PAT_MRT3847_9872C.1.pep
RLQPPHKYVPWVVVDGQPLYEDYENFEAYICKAYKGHPPKVCEGLARPPTPTVLEVAEAVNKVSYYDSGDIRLKPDEDGHAKIKKVVPDDDD

SEQ ID NO: 284280 - protein, 76 aa, Glycine max
  Clone ID: PAT_MRT3847_98730C.1.pep
LIHFFSIPNFFPPFPKNYINFLLSPQIYNIFQPTSTQTSFCSIFNFFLFFFHPILFLYFQRSFPKLNFNPNLFINF

SEQ ID NO: 284281 - protein, 98 aa, Glycine max
  Clone ID: PAT_MRT3847_98731C.1.pep
TPSTLQKRAAGLLFNMGTTPNKGSLGYWAPSKVWFFAGRLDKTRFRRRGPDLSITHRFEEVFGVPHHTGLCCALKEEGKALWNLRERIERDQFDALSN

SEQ ID NO: 284282 - protein, 67 aa, Glycine max
  Clone ID: PAT_MRT3847_98732C.1.pep
IGGTGGEDPILLQTSSAVCKFFILGAVFEGARDLMAWEGTDGFFTVQNGRPDVPLFTIRRKERRVQK

SEQ ID NO: 284283 - protein, 91 aa, Glycine max
  unsure (1)..(91): unsure at all Xaa locations
  Clone ID: PAT_MRT3847_98733C.1.pep
MHAYVSSEFGSFLXXXXXXXTXXAIXXXXPHPQXXEYXPXXXVXXXXAXEXVXAXIXLLXKXYXXXXDACYHXIISHWXSTXAIVXPLQQT

SEQ ID NO: 284284 - protein, 80 aa, Glycine max
  Clone ID: PAT_MRT3847_98734C.1.pep
KNFTILGDKNNFEHIGREFKYPRMYIIKKCFLTNDPLHLGVFRVLSDHHGKGVRVNLGDYKKVLGGGDSGFLTGTCLYWV

SEQ ID NO: 284285 - protein, 149 aa, Glycine max
  Clone ID: PAT_MRT3847_98735C.1.pep
MSLMGAGCRDRVHVVVFLNLLVLFSKGDVLPSEVLHLLGILLLHAIHLPLQGNDQGMFTRHLTQDFHHCCWALIFKDSHGWHAKQVGHLPQWWSLVACGGKFFLGLTVDAKCSYHIQQDLLTMVLFHKPLHELRWEGTCKDTLMLKLEA

SEQ ID NO: 284286 - protein, 65 aa, Glycine max
  Clone ID: PAT_MRT3847_98736C.1.pep
CSKLCSFRCIHICDPYNSLENNTLFYQTGKLLVVLYCFTINMLNIPFFFMLVNAKSITTTYLYSA

SEQ ID NO: 284287 - protein, 293 aa, Glycine max
  Clone ID: PAT_MRT3847_98737C.1.pep
GPEYPSTHASGGLPHKHEKRGLLRGNEVVKALNSEVEAYDRMGPEGNSWRSSNLSFPKDAGNERNGVGVRSSSGSKDVGKDSNKYVPSPFRDDDAGKRDFVRRDGQGGKQQPWNNVVEPYGDRHREQLNRNRADSVQSSVSRSAFSMGGKGLPVNDPLLNFGREKRALPKSEKGFLEDPFMKDFGGSSFDGRDLLGGLVGVVKKKEDVLKQTDFHDPVRESFEAELERVQRMQEQERQRIIEEQERALELARREEEERLRQAREQEERQRRLEEEAREAAWRAEQERIEALRK

SEQ ID NO: 284288 - protein, 92 aa, Glycine max
  Clone ID: PAT_MRT3847_98738C.1.pep
VHEWKRIHEEESLQRWTLSDGHATHKKEKLYVYEIESRGPRNWSLIIRSIPGRSGNSCRLYWCTQLSPSGSRTRPSTTNPTTPLSRPHAPFG

SEQ ID NO: 284289 - protein, 184 aa, Glycine max
  unsure (1)..(184): unsure at all Xaa locations
  Clone ID: PAT_MRT3847_98739C.1.pep
FLVASGLRSFVRGSLMASAQVLPNTAASSRKQEHLEAGKRRLEEFRKKKAAERTKKAASSGQVHNSDASLNKKQSSEVENVRVNESDGVSTSDGVGGSVTGTSTLGMRNDKNLNLISQSSNQGSLAGSTFLARNDLNMLSTSLGEAHSNIDECKRYNASSVTTSADXSQNNETNRXMIYMEXML

SEQ ID NO: 284290 - protein, 59 aa, Glycine max
  Clone ID: PAT_MRT3847_9873C.1.pep
FFFNVLLLRLLYRYLFRNFVEMPSVNWREVADNWFGACCCSFGGISEKMVMRYVSSYMC

SEQ ID NO: 284291 - protein, 99 aa, Glycine max
  Clone ID: PAT_MRT3847_98740C.1.pep
QVAGEWRLPARPCGGVDGARHVGRGRVRGSPGSPVRSSRGPAASACAGSSASGSGRSGPTRKPESAQNNSNTNTHTHSLSNNNNSGELSGSSENSPTAR

SEQ ID NO: 284292 - protein, 105 aa, Glycine max
  Clone ID: PAT_MRT3847_98741C.1.pep
RELKKLGGTKGKVFTGEKWYSRYISKKNKSRKKKGKSLGRQRGGSTHNKGGGQMAAFQGGKLGEPQELKNAPTPGEGKILFEAPGGFFFSRAGGGKVVCHYPDVL

SEQ ID NO: 284293 - protein, 57 aa, Glycine max
  Clone ID: PAT_MRT3847_98742C.1.pep
RLRHGQIQTQGDTQHSQHLGSVLESSGPPQNRAERVYGAPNIVSGGLTASQAVKCEL

SEQ ID NO: 284294 - protein, 65 aa, Glycine max
  unsure (1)..(65): unsure at all Xaa locations
  Clone ID: PAT_MRT3847_98743C.1.pep
DREEKIEEDIGFGKKSEDVNEIKIKXINIKKEDIVVDVIIKKKNKVKINQIDIDXLVESDXRKIV

SEQ ID NO: 284295 - protein, 115 aa, Glycine max
  Clone ID: PAT_MRT3847_98744C.1.pep
GFLPENPGWAEGLLLKSCMSRTEEDLIATIGDDCKIKTLTEGGKRLKLTNGDTAGQERPRTLNRSYYRKAQGIILNDDVTRRETYTNLLQEWSKEVELYSTNHDREKILERNKDD

SEQ ID NO: 284296 - protein, 53 aa, Glycine max
  Clone ID: PAT_MRT3847_98745C.1.pep
LSIVATLLHLALNIYRGSSGGYLGNSALRLERYIVSDYLIINLSPHGCTMRRY

SEQ ID NO: 284297 - protein, 303 aa, Glycine max
  Clone ID: PAT_MRT3847_98746C.1.pep
MDSIGVLMTCPMHSYIQEELAKRFNLFKLWHYPSFSAFAQAHAHSIRALVASAKVGVDAATIDSLPNLEIVSTYSVGYDNIDLHKCRHRAIPVTNTPNVLTDDVADVAIALALSLLCRICPRNSTWQFTPKLSGKAVGIVGLGRIGWAIAKRADGFGCPVSYHSRSEKSETGYKYYSHIIDLAANSEVLFVACTRSEETRHIVNRGVIDAVGPKGILINVGRGPHVDEPELVAALIEGRLGGAGLDVFENEPEVPEDLLGLENLVMTPHVGTDTLETCIAMGDLVIANLEAHFLGNPLFTPVL

SEQ ID NO: 284298 - protein, 78 aa, Glycine max
  unsure (1)..(78): unsure at all Xaa locations
  Clone ID: PAT_MRT3847_98747C.1.pep
MELRTASAIICGDSRLTDKTNFTRKDXHIANVDHTITTQFRKVLPHYIRGQWHTLXIYILCKSVTDQKKGARDVPNIH

SEQ ID NO: 284299 - protein, 52 aa, Glycine max
  Clone ID: PAT_MRT3847_98748C.1.pep
THALRCHILGIGDKTGATLCSMYGIVKLQALARGGLVRYSIAGSESRRCALY

SEQ ID NO: 284300 - protein, 143 aa, Glycine max
  Clone ID: PAT_MRT3847_98749C.1.pep
MTEAYIRKKPGMASVKDMPVLQDGPPPGGFAPVRFARRIPNKGPSAVAIFLTAFGAFSWGMYQVGQGNKIRRALKEEKYAARRSILPVLQAEEDERFVKEWHKYLEYEAEVMKDVPGWKVGESVYHSGRWVPPASGELRPDVW

SEQ ID NO: 284301 - protein, 48 aa, Glycine max
  Clone ID: PAT_MRT3847_9874C.1.pep
QSTNINHVNRKFLLTPINFMEKGQKGEGVKDYPDDYGLPRRMLELKLI

SEQ ID NO: 284302 - protein, 81 aa, Glycine max
  unsure (1)..(81): unsure at all Xaa locations
  Clone ID: PAT_MRT3847_98750C.1.pep
QVGQGNKIRRXLKEEKYAARRSILPVLQAEEDERFVKEWHKYLEYEAEVMKDVPGWKVGESVYHSSRWVPPASGELRPDVW

SEQ ID NO: 284303 - protein, 50 aa, Glycine max
  Clone ID: PAT_MRT3847_98751C.1.pep
RSFSTSRLVRLGLEEQIGEGGAESTFYDSLTSSCTCSTSSTRLALAIDYG

SEQ ID NO: 284304 - protein, 143 aa, Glycine max
  unsure (1)..(143): unsure at all Xaa locations
  Clone ID: PAT_MRT3847_98752C.1.pep
MARTKQTARKSTGGXAPTKQLATKAARKTGPTTGGVTKPDRYRAGTVALRESRIYQKSTELMIRTLPLQKLVRERAQDSTTELRVQSHTVLALQEAAEAYLEELCEDTSPRAIDAKHVTIMPNDIQLTGKIRGERARDGSWKD

SEQ ID NO: 284305 - protein, 193 aa, Glycine max
  unsure (1)..(193): unsure at all Xaa locations
  Clone ID: PAT_MRT3847_98753C.1.pep
MAEFTADLQSLRFPFLDIDNMEMQNLMMPFSCESFLGSPEAEFAGNLEENFPDHNEVPVLVPIINSVKNEIHEGQKRKATDIWEPSSANSTPAVFESGSKTKNSCGRGKRVKRNMIEDKKPNEVVHVRAHRGQATDSHXSLPERVRRGEIXENLRCLQXIAPGCYKTMGIGNNVXDENINLVQSLQHPSGVLS

SEQ ID NO: 284306 - protein, 46 aa, Glycine max
  Clone ID: PAT_MRT3847_98754C.1.pep
CGTLHYQTTQLQPAPWNKKRVMHLEHDLSPREYVQFPMLASLCSTA

SEQ ID NO: 284307 - protein, 66 aa, Glycine max
  Clone ID: PAT_MRT3847_98755C.1.pep
NSLTKKVGPIKKREGSFHPRSGMFRNFIGWVFIPIKGPFAGGCKYCFGGKGSPNESFKKKGLFMEW

SEQ ID NO: 284308 - protein, 72 aa, Glycine max
  Clone ID: PAT_MRT3847_98756C.1.pep
SICSIPSSPGGARIMAMAIGSTRGTVTVVAASPSVGIRRSAKRNVNFRTWFNSFAGLRAQYNVTLLCLPVCT

SEQ ID NO: 284309 - protein, 60 aa, Glycine max
  Clone ID: PAT_MRT3847_98757C.1.pep
KFMEVSKPYVAHGPPMINDGTDSVKLSNFSPPKRFLSRGWKNSSKIGPQFKAITQGQAHL

SEQ ID NO: 284310 - protein, 53 aa, Glycine max
  unsure (1)..(53): unsure at all Xaa locations
  Clone ID: PAT_MRT3847_98758C.1.pep
MGAGSSMXLSSTSVGGNAVKLGPSAPQVGKVSMRKTVTKQVSSGNPWYGPYRL

SEQ ID NO: 284311 - protein, 39 aa, Glycine max
  Clone ID: PAT_MRT3847_98759C.1.pep
NHGHKYKLRHNLADSPEFRNSEIFPEKNVSAKLEIMARL

SEQ ID NO: 284312 - protein, 61 aa, Glycine max
  unsure (1)..(61): unsure at all Xaa locations
  Clone ID: PAT_MRT3847_9875C.1.pep
ELDRSPVSLPYXPPXLSXXCCVATXLAXLXLXGIXLXLXXRALMTXXXXAXFLYXSGSXYL

SEQ ID NO: 284313 - protein, 61 aa, Glycine max
  Clone ID: PAT_MRT3847_98760C.1.pep
NPPKKRKNPVLRLMTSGKLSSALKPTPPFGKTPLVVLPTLVVDLVQGKTSSQNNLTGHRTN

SEQ ID NO: 284314 - protein, 117 aa, Glycine max
  Clone ID: PAT_MRT3847_98761C.1.pep
MTAPFFHMPQKSVIYAYVARGTDILTEYTEYSSNFNTIAFQCLQKLPTAIITFTYNCHGHTFNYLDDNGYTYCVLATESAGRQVPIAFLERINDDFVSKYAGGKAFTDPANRLNKEF

SEQ ID NO: 284315 - protein, 108 aa, Glycine max
  Clone ID: PAT_MRT3847_98762C.1.pep
YYTFILQENKLYNLKNKIQKLSVHQNISAYCIQTATVGNCTVPSGYVVVHIQNCTGHDERLHLRNSRPHIVQMTGTLSNSVSLITVTLGQLVSASQSFTQKQKSQLLI

SEQ ID NO: 284316 - protein, 84 aa, Glycine max
  Clone ID: PAT_MRT3847_98763C.1.pep
LMQISTIFQWLLHRSNWDTFMLGLICSPAYYSLHKAFTIYCYIYQSIAINYRDTVKFRGFRSVTFGSYQSMNDTICGMNNQYLY

SEQ ID NO: 284317 - protein, 68 aa, Glycine max
  Clone ID: PAT_MRT3847_98764C.1.pep
VVVIFFTLASASILGRGPARSIANKRAGEWHSKRLFVRGINNGWDSQKKPRNKKPPKESWGFNPKKEL

SEQ ID NO: 284318 - protein, 58 aa, Glycine max
  Clone ID: PAT_MRT3847_98765C.1.pep
TIVMTSNHSIVSSIVVDQMDTVHALVYSFTKDFSSLECVVVAPSKYLPIAFHSHPPNH

SEQ ID NO: 284319 - protein, 185 aa, Glycine max
  Clone ID: PAT_MRT3847_98766C.1.pep
MATKIPHWVLPHSSTQLRIRPIWSSSIKMAAEDYTFGPYKIHHTEVFYSTNLSYAMVNLRPLLPGHVLICPKREVKRFGDLTADETSDLWLTAQKVGRQLESYHKASSLTLAIQDGPQAGQTVPHVHIHLIPRKSGDFEKNDEIYDAMDEKEKELKQKLDLDKERKDRSLEEMSQEADEYRKLFL

SEQ ID NO: 284320 - protein, 157 aa, Glycine max
  Clone ID: PAT_MRT3847_98767C.1.pep
MAAEGYTFGPYKIHHTEVFYSTNLSYAMVNLRPLLPGHVLICSKREVKRFVDLTADETSDLWLTAQKVGKQLESYHKASSLTLAIQDGPQAGQMVPHVHIHLIPRKSGDFEKNDEIYDAIDEKEKELKQKLDLDKERKDRSLEDMSQEADEYRKLFL

SEQ ID NO: 284321 - protein, 413 aa, Glycine max
  unsure (1)..(413): unsure at all Xaa locations
  Clone ID: PAT_MRT3847_98768C.1.pep
ACCVAGRVDLAQDIYRELKHLESVGQLKLDVFTYSTIIKVFADVKLWQMALKIKQDMLSAGVSLNIVAWSSLINACAHAGLVEQAIQLFEEMLLAGCEPNTQCFNIILNACVEAYQYDRAFRFFHSWKGKKMLGSSGEGYNSNIGQGHMHDVTSIPNGISNSHILNFAERFPFTPTTTTYNILLKACGTDYYHAKALIKEMETVGLSPNQISWSILIDICGASSNVEGAIEIXKTMGDAGIKPDVIAYTTAIKVCVESKNFMQALTLYEEMKCYQIRPNWVTYNTLLKARSKYGFLHEVQQCLAIYQDMRKAGYKPNDYYLEELIEEWCEGVIQNNREKQGEFSSSNKSESERPQSLLLEKIAAHLLKRVADILAIDVQGLTKVEARLVVLAVLRMIKENYGLGLILHGLLYT

SEQ ID NO: 284322 - protein, 58 aa, Glycine max
  Clone ID: PAT_MRT3847_98769C.1.pep
FSFWRTGKRGRQKERPGLKATSICNKQPLNRALLCLERDKMGTTFLLSDVHNLGEWFH

SEQ ID NO: 284323 - protein, 62 aa, Glycine max
  Clone ID: PAT_MRT3847_9876C.1.pep
GVIFSYEPGAVASPCFSMCKQFIKKYPWYCREAAPGISVVSPGRVIACIYKSQHARSVSLEP

SEQ ID NO: 284324 - protein, 163 aa, Glycine max
  Clone ID: PAT_MRT3847_98770C.1.pep
MAVDPAFVGAGRAPGMELWRIENKRPVKQPQIDGKLHTGDSYILLVTKQPSGALEWNIHFWIGSESSQDEYGIAAYKTVELDESLGGGPVQYREVQGSESQLFLSYFKSIGLEYVPGGVASGFAHVERDSYRTRLLHCKGKRTVRVNEVECHNRSLDTGDVSF

SEQ ID NO: 284325 - protein, 250 aa, Glycine max
  Clone ID: PAT_MRT3847_98771C.1.pep
RNPVAQSFTEFYDKWVWKLEEILHQLLEVSKQRTQVVKTEQELQVLISKVTSHLKEYYTVKWASAHEDVLVFFSPTWLSPLENAYLWMTGWKPSMVLKLLETLKKQAASGGDFVMTEEQARKIEELRKRTRMEEEKVEREMERQQVAMADRKMVELVKLTTRARNGGGGGGDAVAEVALKGVLAGLERVMKASDCVRLKTLKGVLDVLSPMQCVDFLAANTAMQLRLRQWGKKKRDMPAGSTLNANHHNN

SEQ ID NO: 284326 - protein, 82 aa, Glycine max
  Clone ID: PAT_MRT3847_98772C.1.pep
ELINPNVLETSEKGIPEDIWTGGSRTDLRSGGRTIPRPGSDASELARRNDDGCSTGLASGADRAVMRYPHAIVRGPFSRGNN

SEQ ID NO: 284327 - protein, 82 aa, Glycine max
  Clone ID: PAT_MRT3847_98773C.1.pep
FLFFFMFFVFWAESKRNVFLARARFKGRARPKRKIRGTLFHPEKNFSYKKGDGPCFHTTKNWGLAFITKLEANPSPNLHCLG

SEQ ID NO: 284328 - protein, 62 aa, Glycine max
  Clone ID: PAT_MRT3847_98774C.1.pep
GTREYHDCSSTYRAAERTVTSRYYDLSFSLLRGSATNDIIVIRNRYLRHIGVFPLYELTSYK

SEQ ID NO: 284329 - protein, 55 aa, Glycine max
  Clone ID: PAT_MRT3847_98775C.1.pep
QYVSVSPSIQLLNIVNTTSRGFSLNWGLQRLHYETLLLLPIKLVWLWKRATYLLI

SEQ ID NO: 284330 - protein, 103 aa, Glycine max
  Clone ID: PAT_MRT3847_98776C.1.pep
LTKKFLRFLSMRAEAFQVLRRKPVQGYAISFLKRDYPCQHMQKHKLTDFIAPVMPGTHTDISELKMSVPARGRHVAPEILQPFISWFRIVTNASSGLGLISQV

SEQ ID NO: 284331 - protein, 68 aa, Glycine max
  Clone ID: PAT_MRT3847_98777C.1.pep
ALYLNNLFFIFCSVSLLRGAYPGIHDLRFFQLIHKASANIATLVSDYFPYLEKGQIPPNVSYLNVKTI

SEQ ID NO: 284332 - protein, 69 aa, Glycine max
  Clone ID: PAT_MRT3847_98778C.1.pep
HIVKTSTRLCITLSITDDLTHRTENLTEIIESNDNGTNNHTLLHEHPVPHQIPPIINDKITHNSPRTSP

SEQ ID NO: 284333 - protein, 126 aa, Glycine max
  unsure (1)..(126): unsure at all Xaa locations
  Clone ID: PAT_MRT3847_98779C.1.pep
GDTTTELVIEGPLCSADFIGTVKVRLAGIGDHLLSIAADQPLRAAATSTFVVRXFSNLRPGISQGGYEPTLTTWIEYSQDLTPCLHEAGAEVARTDFGKRWDRQSHAYYSLFRLTDTGDKPADIIH

SEQ ID NO: 284334 - protein, 95 aa, Glycine max
  Clone ID: PAT_MRT3847_9877C.1.pep
KIMVVAMMLIFLLISTQMESFEPDAADCLDGCTTACVQSDSRLQARCDRKCSIRCGPGNQPNPKYFFFILTMLYIDISWMDKKKEKDKMIFCLLT

SEQ ID NO: 284335 - protein, 34 aa, Glycine max
  Clone ID: PAT_MRT3847_98780C.1.pep
NIIDSQLSISRHSDIYNLYFNENLIQKHIWTLGA

SEQ ID NO: 284336 - protein, 85 aa, Glycine max
  Clone ID: PAT_MRT3847_98781C.1.pep
KGLHLLFLFPPPKVPIQIFSSRPPLSVETKFHFPLLLVLLIIQVIVYSRRYGKYPSFGYVTKNMSKSPNSHLSPPLIPNQKKPLL

SEQ ID NO: 284337 - protein, 123 aa, Glycine max
  unsure (1)..(123): unsure at all Xaa locations
  Clone ID: PAT_MRT3847_98782C.1.pep
LPPLSNPNTSTYAFMTSRDKLDNDRHVAKLGFDIIEALLHAASMNYCKIVKMIVQXVGPAGHDGYGPAICGLSHCNEIDIXTACEADKYSKRSRIHTHIASNALHMEYTLRMSKDKVVNITRN

SEQ ID NO: 284338 - protein, 68 aa, Glycine max
  Clone ID: PAT_MRT3847_98783C.1.pep
KEIFFLHPYKWKINRSLSRIPIFGSKLELGLLLVWGKKKLGWVKDPREGANPAWLRGFPPPFFLGGGG

SEQ ID NO: 284339 - protein, 255 aa, Glycine max
  Clone ID: PAT_MRT3847_98784C.1.pep
TRPRTRGVNMGTREEVVEIERLEESLLEKNEREDEEAVLYAASFREMEEGFVKYQTVQWVLYSVLLILAWGIGILMLLYLPVRRFILRKDVRSRTLYLTPNAIVYKVTRPVSFPCFGVLKKEKHVLLHSVADVVIEQGYLQSLFGVYSLRIENVGVRRPPSDDVKIQGVANPNAFRKAVMMRLSNMRNEILSRQVSTLEDVPHHLMMSPSMSLKHDPNPSGELLLMQKLEEVGSSVKRIQSLFEEQQSQITESID

SEQ ID NO: 284340 - protein, 79 aa, Glycine max
  Clone ID: PAT_MRT3847_98785C.1.pep
LGVSGKPAVVKIPGLKVVVVKRSNGSASCGEVISLCHIEAGNRKNFILCKHRRKMSNNGFQNIHKLIGLFCYNTKKEET

SEQ ID NO: 284341 - protein, 67 aa, Glycine max
  Clone ID: PAT_MRT3847_98786C.1.pep
CWFDYENETLSSVSCVVVLPHRNSITLLLIIYQQYNGNLRISTLTPVVHDQGHCVNEREVEYFFWFI

SEQ ID NO: 284342 - protein, 72 aa, Glycine max
  Clone ID: PAT_MRT3847_98787C.1.pep
FGYYNKVITFICSSHIFNSDSFVGSTYFCLNVLFENTCYRTSLHWCMMVSTCSLSYFLDLNLELLFQLNCLF

SEQ ID NO: 284343 - protein, 35 aa, Glycine max
  Clone ID: PAT_MRT3847_98788C.1.pep
INLKIPSNVFPSSFIVTFHVFHSLHRSWSLHPKEN

SEQ ID NO: 284344 - protein, 85 aa, Glycine max
  Clone ID: PAT_MRT3847_98789C.1.pep
LVAPPNYLAPLPVFPPPIPIVILLIARRSHRHSRLQPETASPHNSTQHTHRYHKTSSLLRLLRDLTHIYCVALTCLFTDRKPDFP

SEQ ID NO: 284345 - protein, 274 aa, Glycine max
  Clone ID: PAT_MRT3847_9878C.1.pep
SSYSARATLTITILTTPKKNKPLVSTLLSSHPSIQTLILPFPSHPSLPPGIENAKDMPLSIRPIMLSLSNLHQPLTNWFRSHPSPPRFIISDMFCGWTQPLASELGIQRLVFSPSGAFAYSTMCFLWKETPKRENEQDQNEVVSFHRLPDSPEYPWWQVSPLFRSYLEGDLDSEKLRDWFLGNIASWGLVLNSFAELEKPYFEFLRKELGHDRVWAVGPLLPEDAKEERGGSSSVSVNDVVSWLDEKEDLKVVYVCFGSMAILSKDHTEAIQTA

SEQ ID NO: 284346 - protein, 91 aa, Glycine max
  unsure (1)..(91): unsure at all Xaa locations
  Clone ID: PAT_MRT3847_98790C.1.pep
GRRLRLVGLCFPLGVXCSGLLLRRACVRAVGFSASLWSFGAPSVSLCSAPFAVGAFLSLPPXALLGLVLVLGGXXLPSXVHXSSPSVFFKA

SEQ ID NO: 284347 - protein, 54 aa, Glycine max
  unsure (1)..(54): unsure at all Xaa locations
  Clone ID: PAT_MRT3847_98791C.1.pep
RRTLISVRSIILVCLMFSFLHVHLFSVSPSYSVCRSFLTKMNTILFPVYLQPXS

SEQ ID NO: 284348 - protein, 116 aa, Glycine max
  Clone ID: PAT_MRT3847_98792C.1.pep
MRGQEDQQSRVFCELSALVFNLLRSPSIVPEPPARRSPAGAQITPAGFASLLLGISVALMLCGSVTFFIGFMLMPWVLGLVMVFYVAGVVSSLSVLGRSILCYATPRKDLPEWKLI

SEQ ID NO: 284349 - protein, 205 aa, Glycine max
  unsure (1)..(205): unsure at all Xaa locations
  Clone ID: PAT_MRT3847_98793C.1.pep
MEEEKQRGKGHRLLLMPSPLQGHITPFLHLGDILFSKGFSITILHTIFNSPNPSSYPHFTFHAIPDGLSETEASTLDAVLLTDLINIRCKHPLKEWLASSVLSHQEPVSCFISDAALHFTQPVCDELKLPRLVLRTGGASSFLVFASFPLLREKGYLPVQESRLDEPVVDLPPLKVKDLPXFQSQDPEAFYKLVCRFVEECKASS

SEQ ID NO: 284350 - protein, 48 aa, Glycine max
  Clone ID: PAT_MRT3847_98794C.1.pep
NVSLPSLVYLFFLRFNYSSRPLPSTSSTSSLPWAGPFLDTAPEKENFL

SEQ ID NO: 284351 - protein, 78 aa, Glycine max
  Clone ID: PAT_MRT3847_98795C.1.pep
PFSNCPFFLGSRPALVVFPLPQKSGSPPPSYVGRRSCLCSVAFRFRGSAPLNYLAGSASVPLVLHPHFFVKLNLVKTK

SEQ ID NO: 284352 - protein, 57 aa, Glycine max
  Clone ID: PAT_MRT3847_98796C.1.pep
VICLKKKKKKKKKKKKKKKKKKKKKKKKKKPRGGARPPFPLIGIFFTPPHWPCFNNL

SEQ ID NO: 284353 - protein, 66 aa, Glycine max
  Clone ID: PAT_MRT3847_98797C.1.pep
HRHQILYKMPSWACLPSRLNPCYVSYELMKLRLIITSRVDFADMANVSSLVALPHVLLEIVWSHFK

SEQ ID NO: 284354 - protein, 70 aa, Glycine max
  Clone ID: PAT_MRT3847_98798C.1.pep
SCKMTANKFNLSDTKKKVISWKKGEVKLDNLKGRTVFFYIKFYFFFFFFFNFYIFTFTFFFFFFLKFLIC

SEQ ID NO: 284355 - protein, 116 aa, Glycine max
  unsure (1)..(116): unsure at all Xaa locations
  Clone ID: PAT_MRT3847_98799C.1.pep
QGHPEPVSYIXWDGNGDALASVSPNLVKVWSLTSGGECIHEFSSTGSQLHSCVFHPSYSTLLVIGGSSSLELWNMXYDNKSLTVPAHENVISALAQSSVTGMVASASYDNYVKLWK

SEQ ID NO: 284356 - protein, 64 aa, Glycine max
  Clone ID: PAT_MRT3847_9879C.1.pep
SDNHLVILSSASTHSKYHSDVCHGSHAYTIKLDPDKPHPLQMSLYRTITRSLDLAHVYLLHSFF

SEQ ID NO: 284357 - protein, 59 aa, Glycine max
  Clone ID: PAT_MRT3847_987C.1.pep
EPFLPLKLPKKLNAQILYECKTWEHSLNKKWITKIQILQNNKVCYRDDRRGIRNAPLLL

SEQ ID NO: 284358 - protein, 99 aa, Glycine max
  unsure (1)..(99): unsure at all Xaa locations
  Clone ID: PAT_MRT3847_98800C.1.pep
XLXNSLXPLAXTSXLXYXGXXLASQXIFVRXLHXLFXHXLRCLDXXFRFVVDLXTLICTSTRXSSGAHRAXISAEXGRQDWXFGRLLKHXLXQWVPISC

SEQ ID NO: 284359 - protein, 98 aa, Glycine max
  Clone ID: PAT_MRT3847_98801C.1.pep
CVTLPVSITGRGWIVSLSLSMDLQDFLIRARVLRLYRQALRIAGRAPSSAKAELRQTIRQEMENNRNCNDKQRIRFLISEGLDKLKRLDEMLDMQGYR

SEQ ID NO: 284360 - protein, 77 aa, Glycine max
  Clone ID: PAT_MRT3847_98802C.1.pep
NLQAPPKATPNQLPYLHLLDSEVKKEQLNDKEFLQRMDETKSKEEEKVKLQRTLKGKTEHDHKKLRQRSGSISKLNE

SEQ ID NO: 284361 - protein, 57 aa, Glycine max
  Clone ID: PAT_MRT3847_98803C.1.pep
AKPRSSHLTSESSKVRRSEIATQVTFYMIPALLLASKNSISTSLLVGAVFHQVYMFH

SEQ ID NO: 284362 - protein, 95 aa, Glycine max
  Clone ID: PAT_MRT3847_98804C.1.pep
KIGLPAKAKVKPQHGDAPFVELGPPCEKEFLNVSLGNLLTYPFVKNGLVNKTLSLKGGFFAFVKGSFELWGLQFGLASSFSVWPSPLFNALFFFP

SEQ ID NO: 284363 - protein, 292 aa, Glycine max
  Clone ID: PAT_MRT3847_98805C.1.pep
TRIKALEESGGWLERTTVEDMDIAVRAHLNGWKFIFLNDVKVPCEVPESYEAYRKQQHRWHSGPMQLFRLSLPAIVRSKVSPWKKANLILLFFLLRKLILPFYSFTLFCIILPLTMFVPEAELPLWVICYVPVFMSLLNALPSPKSFPFIVPYLLFENTMSVTKFNAMVSGLFQLGSSYEWVVTKKAGRSSESDLLAAAEREAKSIEQKIHRGASDSELIESNQLKEHKEAAPAKVKKSNKIYTKELTLAFLLLTASVRSLLSAQGVHFYFLLFQGVTFLLVGLDLIGEQMS

SEQ ID NO: 284364 - protein, 64 aa, Glycine max
  Clone ID: PAT_MRT3847_98806C.1.pep
MLPHVGNNFLLGRKIGSGSFGEIYLSTDNQTYEEDALKLVNDKTYSPKLLHLCKLNRYSSWRNW

SEQ ID NO: 284365 - protein, 163 aa, Glycine max
  unsure (1)..(163): unsure at all Xaa locations
  Clone ID: PAT_MRT3847_98807C.1.pep
LLELGIRLEVTALTPVLTNRMHCQGHVAAALTRGGVDITGPYAHTINDYGTTDTLPFAAMGSGLQAGMPVFEAKYSEXRSSDEGIGLDDDAICAGVFNELGRDRHVDVGVIAKGHNEYHRNHLLPGPRTYDNPHGVRFPKQTAVLLTXITPSKEKVEVIEGYA

SEQ ID NO: 284366 - protein, 64 aa, Glycine max
  Clone ID: PAT_MRT3847_98808C.1.pep
CQDTHSSLAPAHRATESLQVATANLRIASPPTFTDFSVLDAAQSASSPPDTTTPGRPTAPPSTR

SEQ ID NO: 284367 - protein, 46 aa, Glycine max
  Clone ID: PAT_MRT3847_98809C.1.pep
TARVRTDKKTPQRGLYIIAYYFFNGHSEILKSISLKQTIKIINFKL

SEQ ID NO: 284368 - protein, 89 aa, Glycine max
  unsure (1)..(89): unsure at all Xaa locations
  Clone ID: PAT_MRT3847_9880C.1.pep
MGAVEGYRITGGSLGEVTSPIYPGGSFDPLGLDDDPEAFDQLKVKALKNGKLHMFSMSGLFVNAIVNGXGPLEILTDHHADPVTXNAWA

SEQ ID NO: 284369 - protein, 182 aa, Glycine max
  unsure (1)..(182): unsure at all Xaa locations
  Clone ID: PAT_MRT3847_98810C.1.pep
IHRNGNSAHALQVSSYSRVTDDSGPLDGVTDGVPGEDCVGEKQRARRLLDEQFDLLERQEYGTDDDDGDYYENYEADEDESLAEKLKHSLNNHVLDDLELDDDKYKVPADLLKNKDAPHEEQEDSAADVIRRCKEYAEEYEGEDDHKDVVLVQESSDETESWDCETIXVSMYSKLNNPPGKI

SEQ ID NO: 284370 - protein, 62 aa, Glycine max
  Clone ID: PAT_MRT3847_98811C.1.pep
LQHSAPTSLFILLMSKSTIRLKIHSFSSPIINLLSRLWKVPKGIRTHNWGWNSIPFHRELIF

SEQ ID NO: 284371 - protein, 69 aa, Glycine max
  unsure (1)..(69): unsure at all Xaa locations
  Clone ID: PAT_MRT3847_98812C.1.pep
IXWIKIPINNSPLGISLNDHQPPNHHPFFFPFPHHILSPCSFMRREHLFFHLFQLKPNLYIILICFTYF

SEQ ID NO: 284372 - protein, 92 aa, Glycine max
  Clone ID: PAT_MRT3847_98813C.1.pep
GKGPQNPFWGKVFLDVNTFLAKNRGAFVFFGSINSSKRKRAKKQEFKGGAFFNIGQQEETGRGLFWGFAKGQKGQIRGGKTFFGFCKAGPFF

SEQ ID NO: 284373 - protein, 93 aa, Glycine max
  Clone ID: PAT_MRT3847_98814C.1.pep
PGMFPLPRMLSKLPAVLHTGPSTTGVPATTSTILHTPGPLFTCPIQQSLSTKSIKARVFGATIFHGFTDSVAIGIALYSAYIPTGNLSPFCPP

SEQ ID NO: 284374 - protein, 76 aa, Glycine max
  Clone ID: PAT_MRT3847_98815C.1.pep
RKSSLSFVGFRRIEYSARVVLTFSFHPAISISRLSCRLHILGRTNDMSRAAIHKVDAVSPLSATILHALKTGSYDF

SEQ ID NO: 284375 - protein, 40 aa, Glycine max
  Clone ID: PAT_MRT3847_98816C.1.pep
SSTWFPFPNGIPKKRILLWLLPFFSLKPPFFLLRPIGPNY

SEQ ID NO: 284376 - protein, 102 aa, Glycine max
  unsure (1)..(102): unsure at all Xaa locations
  Clone ID: PAT_MRT3847_98817C.1.pep
GGNFCLHVTTLTSYIHLPLSTXTGNSCCASGTFKFQLHPRKPTYAKKKLKKNTRILQEAYGCRLSRPQRSNCLSSRVLKALKAVCWKHFASVATKKLCKLFG

SEQ ID NO: 284377 - protein, 133 aa, Glycine max
  Clone ID: PAT_MRT3847_98818C.1.pep
RISSHVVTTVNRAGAGLVVPLTGLKSMAGFPTGKTNIAIPSIVGTGGGVHCMQGGPPIGRKKFGTFSYWPDLVDAQLAKEVESFLRKGWIPCLEFGWEHGFGFRGPTSLPGSFDGPLWTMWKLPMLGCTDAFK

SEQ ID NO: 284378 - protein, 78 aa, Glycine max
  Clone ID: PAT_MRT3847_98819C.1.pep
KGQKKKNPLFTSFQKKKGEKTFKKGKKKPPKKKKGPQKLKPPFGPKKKGPRPLLKKPLNHLGTQLAPPPFFSTRGQTI

SEQ ID NO: 284379 - protein, 346 aa, Glycine max
  unsure (1)..(346): unsure at all Xaa locations
  Clone ID: PAT_MRT3847_9881C.1.pep
MNNPTLIIFFLVIFSVFFAASADGGDDEPLIMQVVEGSGVRLGAEHHFLDFKRRFGKAYASQEEHNYRFEVFKANMRRARRHQSLDPSAAHGVTRFSDLTASEFRNKVLGLRGVRLPSNANKAPILPTDNLPGXCGSCWSFSTTGALEGAHFLSTGELVSLSEQQLVDCDHECDPEEPGSCDSGCNGGLMNSAFEYILKSGGVMREEDYPYSGADSGTCKFDKTKIAASVANFSVVSLDEDQIAANLVKNGPLAVAINAAYMQTYIGGVSCPYVCSRRLNHGVLLVGYGSGAYAPIRMKERPFWIIKNSWGENWGENGYYKICRGRNICGVDSMVSTVASVHTTTQ

SEQ ID NO: 284380 - protein, 63 aa, Glycine max
  Clone ID: PAT_MRT3847_98820C.1.pep
ILLQEDLLVKVGVILGIYCPYSFRFALKFVVWRFDRCIPPYARQSSHPLSSSFSPNFHFHLQL

SEQ ID NO: 284381 - protein, 128 aa, Glycine max
  Clone ID: PAT_MRT3847_98821C.1.pep
GSYFCSASLRGFIFFFVGLNFISWPVFLQRLAWENLGLPYFIGLAAHPLFPMWGYREGAWTVPFFHRFDLFIGKGNPPFAGPLSPGVVGFSPSWPLFFAGLFWAPFFWRFFPFFCFALFWGSGFFPRF

SEQ ID NO: 284382 - protein, 169 aa, Glycine max
  unsure (1)..(169): unsure at all Xaa locations
  Clone ID: PAT_MRT3847_98822C.1.pep
ENFKMLKILCLHGWRTRGSILKKQINRWDPSIFTQLDMAVPNGKYPVRRKSDIEGIFPPPYFERFQYKKDFTGYFNLEESISYLCEYITTTRPSDGFLGCSQGATXLSALLIGHQAHGXFLYEPSPIKFLISISGCHFRNPNICDVAYKNTNKAKSVXFLGEKDWLKLP

SEQ ID NO: 284383 - protein, 82 aa, Glycine max
  Clone ID: PAT_MRT3847_98823C.1.pep
GFFFFFFLIFHITLGTPQQKPGSLGSESSFALVTGNTTMDSAEKRLNELGYKQELRREMTTGSLYFWAAHLAGPKWGPFSSW

SEQ ID NO: 284384 - protein, 550 aa, Glycine max
  Clone ID: PAT_MRT3847_98824C.1.pep
GFFFFFFLIFHITLGTPQQKPGSLGSESSFALVTGNTTMDSAEKRLNELGYKQELRREMTLFKTLAISFSTMTLFTGITPLYGSSLQYAGPATLVWGWIVVSFFTWFVGIAMAEICSSFPTTGSLYFWAAHLAGPKWGPFSSWCCAWLETIGLIAGIGTQAYAGSQTLQSIILLSTGTNKGGGYFAPKWLFLCMYIGLTVIWAALNTFALEVIALIDIVSIWWQVIGGIVIVIMLPLVALTTKSASFVFTHLELAPESTGVSSKPYAVILSFLVSQYSLYGYDAAAHLTEETKGADKNGPIAILGSIGIITVFGWAYILALTFSIQDFGYLYDPNNETAGAFVPAQILYDAFHGRYHNSAGAIILLFVIWGSFFFGGLSITTSAARVVYALSRDKGVPFSHLWRQLHPKYKVPSNAVWLCAAICILLGLPILKVNVVFTAITSICTIGWVGGYAVPIFARLVMSEKNFKPGPFYLGKARRPVCLVAFLWICYTCSVFLLPTLYPITWDTFNYAPVALGVGLGLIMLWWLLDARKWFTGPVRNIDIQNGKV

SEQ ID NO: 284385 - protein, 50 aa, Glycine max
  Clone ID: PAT_MRT3847_98825C.1.pep
LNGVSSDGIGFDYGCPESLRWPNVGKYKVDVASFESLALLELQVREDTDL

SEQ ID NO: 284386 - protein, 62 aa, Glycine max
  Clone ID: PAT_MRT3847_98826C.1.pep
CIANHASFTANEAPTSSLRTEPTNQYTPPLLVCSTKTTHLHSLCLYIFLLSIEIEFLSGTAI

SEQ ID NO: 284387 - protein, 71 aa, Glycine max
  Clone ID: PAT_MRT3847_98827C.1.pep
ASGLVILIQSARIVPTLPHSHLYDPLGYNPQCVISKNTALCLNCIILNVQPFCTFMNINVRCIKPYHVTQG

SEQ ID NO: 284388 - protein, 99 aa, Glycine max
  unsure (1)..(99): unsure at all Xaa locations
  Clone ID: PAT_MRT3847_98828C.1.pep
HNNVXPXGHFRKHWQXYVKTWFNQXARKXRRRLXSQXKAVRXFPRPXGGPLRPIVXHGQTLKYNMXVRAGRGFSLEELKAAGIPRKLAPXIGIAVDHRR

SEQ ID NO: 284389 - protein, 106 aa, Glycine max
  unsure (1)..(106): unsure at all Xaa locations
  Clone ID: PAT_MRT3847_98829C.1.pep
SSKTTIGADLFEQFSLVDGKIVNITGINEIAKTTTVLXLGSNQPVLHEAXRNLLHALCVARCLVSKRFFIVRGCAPYIELFQQLGAWAKVLYGIVGYCVRAFLEAP

SEQ ID NO: 284390 - protein, 58 aa, Glycine max
  Clone ID: PAT_MRT3847_9882C.1.pep
HAASAIPRSAVPSNHVAPFTGSLFPSTFPFGIGPSAYQADGAASVDGRGPSIWDTDTR

SEQ ID NO: 284391 - protein, 55 aa, Glycine max
  unsure (1)..(55): unsure at all Xaa locations
  Clone ID: PAT_MRT3847_98830C.1.pep
QQLPRPSSSFFFTIEKAGLRRLSRPSSWLVLAPAAXSSCSCCSCSSAGGQDVARR

SEQ ID NO: 284392 - protein, 142 aa, Glycine max
  Clone ID: PAT_MRT3847_98831C.1.pep
NSARGLSFISFADVVQAEHVEHDRQEVLGATSNEALQFMSLSSTANRSPSPVRSAASSPPTTSGAASPKHADLARTRSPASPTSPIVLGSPNPASGEELPVQIETMRQALRKTHSGDLSGARSQPLSAASLEESAADKPPFK

SEQ ID NO: 284393 - protein, 32 aa, Glycine max
  Clone ID: PAT_MRT3847_98832C.1.pep
VRGSTQGVELVEPVRVLLKTGGYMYFLPEIPN

SEQ ID NO: 284394 - protein, 111 aa, Glycine max
  Clone ID: PAT_MRT3847_98833C.1.pep
RLFMVGFTKRIPFMVLVKVLAGSVFAHPTRVFTTMLRMQRLVLYTPLSSHCVLVLAICRALFVSVAKGRGLCYPPFLQWSCIVSVRLSILESPVWRFRSSEGRYQPRIRWM

SEQ ID NO: 284395 - protein, 64 aa, Glycine max
  Clone ID: PAT_MRT3847_98834C.1.pep
HLILLLQTMPWKANVYPRSHQTIMIFGLIPQLKAFGCFSESPSSVASLIHFSNHGKRHDCQIRT

SEQ ID NO: 284396 - protein, 40 aa, Glycine max
  Clone ID: PAT_MRT3847_98835C.1.pep
NSFKRGLSGDGIKWNFYNFLVDKEGSVDDLYALHNFFSEH

SEQ ID NO: 284397 - protein, 31 aa, Glycine max
  Clone ID: PAT_MRT3847_98836C.1.pep
YIYTWDNSRTYLVQFILENQLLSLSASKDSF

SEQ ID NO: 284398 - protein, 107 aa, Glycine max
  Clone ID: PAT_MRT3847_98837C.1.pep
LLGRGPHTFFCWPKTRGGFYSFNNLVGTWVPTKQEIFLSFPPRRDKRKFFSSLRTKKPPPPIKKIFLKTPPSFLSKVSFLHPFKPNSITARFFFFKKNNFFFSFFPL

SEQ ID NO: 284399 - protein, 118 aa, Glycine max
  unsure (1)..(118): unsure at all Xaa locations
  Clone ID: PAT_MRT3847_98838C.1.pep
VQPDEAIYLKIXNKVPGLGMRLDRSDLNLLFRARYPREIPDAYERLLLDAIEGERRLFIRSDELDAAWALFTPLXKEIGSXENKKIAPELYPYGSRGPVGAHYLSAKHNVRWGDLGED

SEQ ID NO: 284400 - protein, 71 aa, Glycine max
  Clone ID: PAT_MRT3847_98839C.1.pep
RSPPNKTNATTTGHLNTGSTGSSKAIRNVIYTSTTTTTTTSSGSVSMYINTRLSWFSGRQTYTYGHDLTYL

SEQ ID NO: 284401 - protein, 146 aa, Glycine max
  unsure (1)..(146): unsure at all Xaa locations
  Clone ID: PAT_MRT3847_9883C.1.pep
LAIVSCLSCLNSTYSYVQCDPEEPGSCDSGCNGGLMNSAFEYILKSGGVMREEDYPYSGADSGTCKFDKTKIAASVANFSVVSLDEDQIAANLVKNGPLAVAINAAYMQTYIGGVSCPYVCSRRLKSWVLLGGIWXSGAYAPIRMK

SEQ ID NO: 284402 - protein, 122 aa, Glycine max
  unsure (1)..(122): unsure at all Xaa locations
  Clone ID: PAT_MRT3847_98840C.1.pep
QISPDLFNFTVANTWNSWQQPHLTRGGGASQTIHETQLKAYCYMVMCTAVKATNTSFXLKTHKADLAFFKGRSVHLEEENKMLCDRDGTDXGQNSTSSDDDLIRLFLXTLLAVKGGLASENE

SEQ ID NO: 284403 - protein, 100 aa, Glycine max
  unsure (1)..(100): unsure at all Xaa locations
  Clone ID: PAT_MRT3847_98841C.1.pep
LKPGPASVEIDDHPMQIEETQYPKTFFYKEDLHPGKTMKVQFSKPPFLXPCTNTPWLLKGRLAELYFQQPWGVGTWLKEGRDAAKDGYSFDELCIMKEAI

SEQ ID NO: 284404 - protein, 98 aa, Glycine max
  Clone ID: PAT_MRT3847_98842C.1.pep
QNLLFRENLSEENNHCINPAHIALLVRHLLVAGTNSLRNPSCRALFVMDLCPHTSIEASSFLKQDKLGLSYIVGTLKAILNMKKQEDEGGKKQGLRWV

SEQ ID NO: 284405 - protein, 48 aa, Glycine max
  Clone ID: PAT_MRT3847_98843C.1.pep
EHNPSYVCPIRLKLKMSNKYSYAISFGVFKKEIISLGKKIILVLPQNN

SEQ ID NO: 284406 - protein, 94 aa, Glycine max
  Clone ID: PAT_MRT3847_98844C.1.pep
FGASTFGLRPPNGESIPLTLQALPYAVTKSVAHATILGKPNIKTVRIFPKILKWFLRLAGYIASCLGIIEYDRASSFLCPKGQQTCWAKSCETT

SEQ ID NO: 284407 - protein, 54 aa, Glycine max
  Clone ID: PAT_MRT3847_98845C.1.pep
TLLQVLEASPSYLDLNMPIEDVEDGTTYKDYESDAWLNDLCDQVEEEDPSKPLN

SEQ ID NO: 284408 - protein, 70 aa, Glycine max
  Clone ID: PAT_MRT3847_98846C.1.pep
STPWCLGLGIVRGIDTVKGVLYVITPVPHNSLEKVNVLLQGYIQIPSCLLQVQGCISPYMSANTLTLTSN

SEQ ID NO: 284409 - protein, 52 aa, Glycine max
  Clone ID: PAT_MRT3847_98847C.1.pep
IVSLYKALNSKTRFIKCALLCSSKPNMFYTCRNCDFSDQTNSPKGNTFWVIP

SEQ ID NO: 284410 - protein, 108 aa, Glycine max
  Clone ID: PAT_MRT3847_98848C.1.pep
MDSSYFGEPNMGNERVSGSSSSSSSRKGKKNNQDKSKQPQRGLGVAQLEKIRLHGQMACGGYHPPLHSPYPSNFNNVRVPFSFLSKTMIAIFLAWILDFNIGGILINS

SEQ ID NO: 284411 - protein, 185 aa, Glycine max
  Clone ID: PAT_MRT3847_98849C.1.pep
MDSSYFGEPNMGNERVSGSSSSSSRKGKKNNQDKPKQPQRGLGVAQLEKIRLHGQMACGGYHPPYPSNFNNEDPRVQTPYLSVPSSSSFSYSSSSTSYSPSYGSQPNIVMGSSEYERTNIGYGDSQPTNIARWEHSTAQTRPLLNLYDSQHIDTKKYISGSGGASSQNSESSDTQEPDLELRLSL

SEQ ID NO: 284412 - protein, 70 aa, Glycine max
  Clone ID: PAT_MRT3847_9884C.1.pep
KNAKKRNRRKKNTKLEVTSKRKKKGQHEGPRENLGECFYVKNGSEKPNWGSKWGGQARRRGKKWAPTPPG

SEQ ID NO: 284413 - protein, 79 aa, Glycine max
  Clone ID: PAT_MRT3847_98850C.1.pep
LRVCLFPVAPIYLALFSSFLFSPCEKARIMQLCKNKTLLFAVAFLNQKNKKRSKRNHCSSLLSLSLPGMINPKQFRTKK

SEQ ID NO: 284414 - protein, 46 aa, Glycine max
  Clone ID: PAT_MRT3847_98851C.1.pep
AGSVPMPHFKIVLLRPDKTVGILLLVTERYYWFFWMYPSLSMYGVF

SEQ ID NO: 284415 - protein, 88 aa, Glycine max
  Clone ID: PAT_MRT3847_98852C.1.pep
HPLKCVGTEISHSRPHKTGGFSSNYTEIVGPNWTAVWSFTENLSCSIHTKPSACKSPLPRVGEPLLVKAVPYSPCVSAPLHMCKHCHL

SEQ ID NO: 284416 - protein, 50 aa, Glycine max
  Clone ID: PAT_MRT3847_98853C.1.pep
KIGLPDVAFKKRAMALEITKRLPLTRKPFLTVKYKCLHPYNKREEPFYDI

SEQ ID NO: 284417 - protein, 292 aa, Glycine max
  unsure (1)..(292): unsure at all Xaa locations
  Clone ID: PAT_MRT3847_98854C.1.pep
MEVEVHGEDGSKFALGRDQKTVFGRGCGFSTHDRTVSRRHVSFELDHSHSEDANARVSFQVMGKNPFWVYDGEALRLFRKFDKGHLQLGHRFCFSPNTPLWFTLTNIQPLPQLNLDEIHVSEIDPVKEFENAXFGFLVMGHEFDHYPKGMIRNAKNWKWFLQEPRKDSEDEEDVEKERRKMTGKRKNXKVNEDDEWTGESDHKNLVANMRKGKPPRYSTRSKESTGGIKDTKASKNSKLKKASSVDETGEEVDDDDETLVGFIVADEGDDKEEENDEEEAEFEDDDDDELND

SEQ ID NO: 284418 - protein, 50 aa, Glycine max
  Clone ID: PAT_MRT3847_98855C.1.pep
ETASNMDSIKEQIEQIMELENLEERWKIQAEANDEAERLLSSQPMPLDEV

SEQ ID NO: 284419 - protein, 92 aa, Glycine max
  Clone ID: PAT_MRT3847_98856C.1.pep
SFRIRANYTLPNYSHTDLSTTVIIICPGLVFRNCSSICVYGMCSPPKHALSEPYYVSSIALGYRPNRSVRSLTFLAVVIPPRPNLVLAPTHG

SEQ ID NO: 284420 - protein, 59 aa, Glycine max
  unsure (1)..(59): unsure at all Xaa locations
  Clone ID: PAT_MRT3847_98857C.1.pep
YKISEQHAFLPEYLPSSISAILLLETIHSSSSCLIIIDCXICKMYFQELLPLVATFXDD

SEQ ID NO: 284421 - protein, 59 aa, Glycine max
  Clone ID: PAT_MRT3847_98858C.1.pep
KLRSHYAYIYIYIYIYIYMLETYESFILHVHSLFFLLKLISITNFILEYMYGIRNRLLE

SEQ ID NO: 284422 - protein, 53 aa, Glycine max
  Clone ID: PAT_MRT3847_98859C.1.pep
NTWIGQIMEERCSFHGILLSSGSSNAFILRPAILAHVGHIIHYPVIRVGIRTL

SEQ ID NO: 284423 - protein, 33 aa, Glycine max
  Clone ID: PAT_MRT3847_9885C.1.pep
TGMATWRGTILNHSGGASKISYPKIYPLKVMHF

SEQ ID NO: 284424 - protein, 61 aa, Glycine max
  Clone ID: PAT_MRT3847_98860C.1.pep
DEGSWGGWGYLGLRTLDRLGCYSRSLISWDDFFRLGKCVTRVLWCGIRHLGCSLFGIIVVS

SEQ ID NO: 284425 - protein, 43 aa, Glycine max
  Clone ID: PAT_MRT3847_98861C.1.pep
PPFFFFFKMKPCFSGSQLMRHGEAIYGIKPFDAIQNWGNHCLT

SEQ ID NO: 284426 - protein, 55 aa, Glycine max
  Clone ID: PAT_MRT3847_98862C.1.pep
GEPKGSLKEVFPSCYNCQPGRCRIGGSINGPKVHGWLPPPEGSTMAISLPWLGNG

SEQ ID NO: 284427 - protein, 46 aa, Glycine max
  Clone ID: PAT_MRT3847_98863C.1.pep
IMPLTSFSITYLNNFFSETHRNKFFFKFILISFIIKFISYIRHGIM

SEQ ID NO: 284428 - protein, 45 aa, Glycine max
  Clone ID: PAT_MRT3847_98864C.1.pep
GGGKENNNSFLIALQDAFAIKRILGFKLDFLFPTLSQLKALLPFI

SEQ ID NO: 284429 - protein, 59 aa, Glycine max
  Clone ID: PAT_MRT3847_98865C.1.pep
MRDLKTYVSVAPEASSLWLGAFAGLLIETNRYFSRGIDLPLFYILGIDTERGEEDYTAN

SEQ ID NO: 284430 - protein, 199 aa, Glycine max
  Clone ID: PAT_MRT3847_98866C.1.pep
MDSISPRAQENNNTTAKAMMTRSEPANPYPTTFVQADTSSFKQVVQMLTGSSETAKQAAAGGSSKPSNSIPPMKSIPNKKHFSKLYERRANSLNLKNINPLTSFFSNHNTNSPRKPDILSPSILDFPALVLSPVTPLIPDPFDRSNAAIDSEAEDKAIKEKGFFFHPSPRDKSQPRLLPLFPTTSPRASSNAPSSAPPS

SEQ ID NO: 284431 - protein, 154 aa, Glycine max
  unsure (1)..(154): unsure at all Xaa locations
  Clone ID: PAT_MRT3847_98867C.1.pep
LINLLFFFVIVEAKTIAWMKTLLTTATQLEVAEESQRQNKDSPHPECRKILKSLEAFIPVKQDYSQIPPREYDGILHGKNVVEGIDHADTSQHPHVSLFMDDADVMVEELTVKSYNGSSLDIGTSNNREQIYNRQNHWXNLYQLASNSGIGNSL

SEQ ID NO: 284432 - protein, 47 aa, Glycine max
  unsure (1)..(47): unsure at all Xaa locations
  Clone ID: PAT_MRT3847_98868C.1.pep
MQIFVKALTGISVSLXVESSDTIDNVXAEIQYKXGIQPDLQRLLYAG

SEQ ID NO: 284433 - protein, 239 aa, Glycine max
  unsure (1)..(239): unsure at all Xaa locations
  Clone ID: PAT_MRT3847_98869C.1.pep
METNNKQQQQKKKWFMPLVLSLLLSTLLILFSIFVSSDSSSLLYLYRTRGRLEEPRFVESKLRLSATSSSDSVPRIAYLISGSMGDGDTLKRTLKALYHPRNQYAVHLDLEASSQERLELANFVKNDPLFAEVGNVRMIVKANLVTYRGPTMVTNTLHAAAILLKEGGLWDWFINLSASDYPLITQDAXQACSSFSLFRCXPXWWXRRNTRFQNXNLLHTLSSIPRHLNFIEHTSDIGW

SEQ ID NO: 284434 - protein, 64 aa, Glycine max
  Clone ID: PAT_MRT3847_9886C.1.pep
LKMDVTYTCPNTYLTQFFEHMTQHLPLGRETYFAGVHFQGHIVKFQQEVGLKQRVTPHSTKCAA

SEQ ID NO: 284435 - protein, 77 aa, Glycine max
  unsure (1)..(77): unsure at all Xaa locations
  Clone ID: PAT_MRT3847_98870C.1.pep
VNGLDRVGVVKRVENMGXRAAASYFVHGDRRMLGLCSGKTAPLRCRTPPIRWRITPPWRVRXXAVEESLRRGRVWXS

SEQ ID NO: 284436 - protein, 78 aa, Glycine max
  Clone ID: PAT_MRT3847_98871C.1.pep
EDFTMEIWNSWCFLLIMQFLNFFSCWISFAKWRTLFSRAFGYGHKVVKGDFSTWIFSSFNGLCHSRIFHILPLVPFLG

SEQ ID NO: 284437 - protein, 87 aa, Glycine max
  Clone ID: PAT_MRT3847_98872C.1.pep
LKKVAETIYLVVQPGKSFLLFLTGEVQKKTAPKILGLHPCGFRPQPFSKLGNEFRLFFNYDPGAKLGGWEKKVFFPWVSLLQSFPLG

SEQ ID NO: 284438 - protein, 267 aa, Glycine max
  Clone ID: PAT_MRT3847_98873C.1.pep
PPVRPVARGQQRGAGKIKSPNEKLSGPLDEIVKRRMEDKNRTSKNFLSLILNARESKKVSENVFSPDYISAVTYEHLLAGSATTAFTLSSIVYLVAGHREVEKKLLQEIDGFGTPDRIPTAQDLHDSFPYLDQVIKEAMRFYTVSPLVAREASNEVEIGGYLLPKGTWVWLALGVLAKDPRNFPEPEKFKPERFDPKCEEMKRRHPYAFIPFGIGPRACIGQKFSLQEIKLSLIHLYRKYVFRHSLDMENPVEMEYGMVLNFKHGLK

SEQ ID NO: 284439 - protein, 84 aa, Glycine max
  Clone ID: PAT_MRT3847_98874C.1.pep
NRKTPIPHRTVPLSILVFKSAYVPLPLPSEQVHALNPVGSHMATPPQWEFSWYLSLSLSLSLSLYIYIYIYIYIYIPFQPSFNF

SEQ ID NO: 284440 - protein, 256 aa, Glycine max
  Clone ID: PAT_MRT3847_98875C.1.pep
GNSSQVNGSTSQSADSCGSNLNLSVPLLFGTTNLNCLPVWNAQGYILRYSQTSQNIWSFILSAPNPNSYIAIGFSPNGGMVGSSAIVGWISSNGAGGGMKQYYLTGLTPNQVVPDRGNLKVLTNSTFITSQSSRLYMAFQLETNQPLSKLIYAFGPNGVFPSAPSFALALHQDKVSITLNYATGSSATTGKSYNLKRSHGLLNILGWGILIIMGAIVARYFKEWDPFWFYFHASVQSLGFVLGVTGVISGFVLNNQ

SEQ ID NO: 284441 - protein, 149 aa, Glycine max
  Clone ID: PAT_MRT3847_98876C.1.pep
NKLFDCVYTCLLKVANPKEKKGNEVDNILFHEGMMNNPALLSRLFPGINREREMSAMVSALTHVVSGEVPTGDSSSVLHHQPHDDDAVTVKPNMPSTTPFSSTYVVATSSLKRSRQHDTYTPSFSHPPSSFPAMPTSAECSKSGMGNAV

SEQ ID NO: 284442 - protein, 211 aa, Glycine max
  Clone ID: PAT_MRT3847_98877C.1.pep
MGNCSMKGTTGECHHSIRVMCDSGAILQLKAPKTVAQVLQHYPGYGIFRQGHASAPLPEQESLSYDLFYYLLPLKEVQVEHQKSCCDKVQQVVQRSEEMCKSAACDYVENLSNGSALEVLPTAKNGVWRVKLLIDPRQLEKILSEQVNTEALIEKMRMAATACSTTTPSPSRTPTPTMSSRKLLGWKTTLFNAKIAKDTSPAASNFFLGSC

SEQ ID NO: 284443 - protein, 98 aa, Glycine max
  Clone ID: PAT_MRT3847_98878C.1.pep
PFHRGNLGGQNCYWGHCTRSPYSCLYIGAGGNNGCQMPIMAQAENASFKGSDCTSVVQGFITNSNTTEQHEACMETIIDRHASAECYIIGAMLSDDAY

SEQ ID NO: 284444 - protein, 139 aa, Glycine max
  Clone ID: PAT_MRT3847_98879C.1.pep
MHGYYRSLGKHGVRFFSLVFSLMHKFRAVHSELVRSMEDIGPNSCTRPVTEKKARPLEQLNCPRCSSTNTKFCYYNNYSLTQPRYFCKTCRRYWTEGGSLRNVPVGGGSRKNKRVTSSKVPDLNPPISLSSVSAISSQN

SEQ ID NO: 284445 - protein, 87 aa, Glycine max
  unsure (1)..(87): unsure at all Xaa locations
  Clone ID: PAT_MRT3847_9887C.1.pep
MFFFFVGGLQQELRQVLKSGVGKCTCCANNRVDLVNYDKVLKLFFVPAARXAADSASAKVPGALRCRLCDRAVEADFRFCPFCGSEL

SEQ ID NO: 284446 - protein, 65 aa, Glycine max
  Clone ID: PAT_MRT3847_98880C.1.pep
IVRFGSTGNVVSNGNKKCWFQALVSSFIGSLFFGQSLKSPPSSSNFCSQNWVFDQRGQDPFYHSV

SEQ ID NO: 284447 - protein, 257 aa, Glycine max
  Clone ID: PAT_MRT3847_98881C.1.pep
MEDIGPNSCTRPVTEKKARPQEQLNCPRCSSTNTKFCYYNNYSLTQPRYFCKTCRRYWTEGGSLRNVPVGGGSRKNKRVTSSKVPDLNPPISLSSVSAISSQNPKMQGVHDLNLAFPAAMDKYHHGTSPYVEMPKLEIGGDHSTSHHSHHHSHSPSSAVELLRSGMDSRGLNPYAPNSLMSGSDHSLYTPGYPMQEIKPNLSFSVDDGFGNRSYGVQENGGGRLLFPFGDIKHLSAGLEVEHNKEQGNNSTGYWTGW

SEQ ID NO: 284448 - protein, 166 aa, Glycine max
  unsure (1)..(166): unsure at all Xaa locations
  Clone ID: PAT_MRT3847_98882C.1.pep
RNSAREIIGAVGIPVEHLCSGTRVEGFFPILGANGKPCKGGSVLSLSIQYTPVEKVPLYSHGVGAGPDYEGVPGTYFPLRKGGKVTLYQDAHVEEGCLPSLKVDGYVNYKHGSCWHDIFDAISEARRLVYIVGWSVYYNVSLIRDSANGKSYTLGDLLKXKSHEGV

SEQ ID NO: 284449 - protein, 252 aa, Glycine max
  Clone ID: PAT_MRT3847_98883C.1.pep
MEDIGPNSCTRQVAEKKARPQEQLNCPRCSSTNTKFCYYNNYSLTQPRYICKTCRRYWTEGGSLRNVPVGGGSRKNKRVTSSKVPPDLNPPSLSSVSAISSQNPKMQGVHDLNLAFPTAIDNYHGMSPYVEMPKLEIGGDHSTSHSHHHSPSAVELLRSGMASRGLNPYAPNSMMSTSDHSLYTTGYPMQEIKPNLSFSVDDGFGNRSYGVQENGGGRLLFPFGDIKHLSAGVEVEHNKERGNNSTGYWTGW

SEQ ID NO: 284450 - protein, 119 aa, Glycine max
  Clone ID: PAT_MRT3847_98884C.1.pep
LSGPVTPVTGGMSQAASGTNNDPTTTTVDNGTTWDFPSTSVGQTTASPNNTSVWSFTSTPATESAQPSNEVPLHTEVSYAYKTSSMQYVPSVSTVCSSTTQPINSPVKDVASNNQPSLA

SEQ ID NO: 284451 - protein, 76 aa, Glycine max
  unsure (1)..(76): unsure at all Xaa locations
  Clone ID: PAT_MRT3847_98885C.1.pep
RTKDNNLLGKFGLSCIPPGPKGGPQNNGCLDNDANGNLDVPGEDXPMGKKIRLPTTIARVNRPRENSEKRVKRAEI

SEQ ID NO: 284452 - protein, 219 aa, Glycine max
  unsure (1)..(219): unsure at all Xaa locations
  Clone ID: PAT_MRT3847_98886C.1.pep
AFFRPPTRSTTRADVRNRLRNKRYVDLFDDIWNEKFWDHIECAVIDNKNGSRILITTRDEKVAEYCRKSSFVEVHNLEKPLTEEESLKLFCKKAFQYSSDGDCPEELKDISLEIVRKCKDLPLAIVAIGGLLSKKMXSAPEWGQFSRDLSLDLERNSELNSITKNLGLSYDDLPINLRSCVLYFGMYPEDYEVKSDRLIRQWITEGCVKHDTGKSVEEV

SEQ ID NO: 284453 - protein, 64 aa, Glycine max
  Clone ID: PAT_MRT3847_98887C.1.pep
NWIHNLEVSSPFEVWNRLCWYLRKILLLLELYQWVLFSMILVLSSPCIQNITVQQLNNNNNLSF

SEQ ID NO: 284454 - protein, 141 aa, Glycine max
  Clone ID: PAT_MRT3847_98888C.1.pep
GGKKAYSQTFVRGANFHQFGEIGFQNWEDFGQSGNIAGYSFFFIGFGKGQCPPTNKVPPNFKNPVVKCPPRVNPRAGAAIKMFFQKGGMGNKRPQNWGRKYLGQQLYLRGEPPPQSGGEKNRVPKKGFLCGRENGFYKRPF

SEQ ID NO: 284455 - protein, 82 aa, Glycine max
  unsure (1)..(82): unsure at all Xaa locations
  Clone ID: PAT_MRT3847_98889C.1.pep
LLXYSXSSSEPQTPKPSITIPNFIETXEXXXNNXNKSSEKWRARWRXXVARARKXSLWSCXLHXVGRXSAIQKSGYXKENEX

SEQ ID NO: 284456 - protein, 52 aa, Glycine max
  Clone ID: PAT_MRT3847_9888C.1.pep
GETDPPEIAMKELRKRKKPFTIGRYLPNGNYKNWGVNKLIVENPWKRQGGGD

SEQ ID NO: 284457 - protein, 90 aa, Glycine max
  Clone ID: PAT_MRT3847_98890C.1.pep
LSNWDCDEKERDLFVTNLLDPPRRFEDPIQKIFPPECSSQNYFDRWKKFFLMTIPIKYKALKGAAFGVWWGKIICPLAPLNFGVPFVETL

SEQ ID NO: 284458 - protein, 37 aa, Glycine max
  Clone ID: PAT_MRT3847_98891C.1.pep
AVESFVLYGSLISNKWHGLQLNALHNIIDEELCFPLL

SEQ ID NO: 284459 - protein, 66 aa, Glycine max
  Clone ID: PAT_MRT3847_98892C.1.pep
VLFLIGLTKLHAKLETDSVLPIIDISLCRKKFPIRVHLLGGIFLVPILMCIKGRCLRTNCLEYLYP

SEQ ID NO: 284460 - protein, 81 aa, Glycine max
  Clone ID: PAT_MRT3847_98893C.1.pep
SITRHICYMDMALAVFPSSKSKLRKTQTRSLGETRQHKCGQKHTGKRNFINMNFSLCLRSPIALLLGHFLFGFSTLCSVHS

SEQ ID NO: 284461 - protein, 36 aa, Glycine max
  Clone ID: PAT_MRT3847_98894C.1.pep
RSKKTTEGRRGIWHSDSVSVRDRRICPASGLSCYGF

SEQ ID NO: 284462 - protein, 106 aa, Glycine max
  unsure (1)..(106): unsure at all Xaa locations
  Clone ID: PAT_MRT3847_98895C.1.pep
WEDLDIGERLAFGSYGEFYRARXNGTEVAEKNFLDQDLCGDALSQFKFEVHIMFMVRHSNVELFMGAITRFPHDSILTEYLSXGTLYRLLHRPNLLLDEMKLLLMD

SEQ ID NO: 284463 - protein, 389 aa, Glycine max
  Clone ID: PAT_MRT3847_98896C.1.pep
FTEEEIAQYQYLELDSFDADIPIVQRHGSSFRRLTLIGSDGSQRHFIVQTSLTPNARSDERILQLFRVMNQMFEKHKESRRRHICIHTPIIIPVWSQVRMVEDDLMYSTFLEVYENHCARNDREADLPITYFKEQLNQAISGQISPEAVVDLRLQAYNEITKNLVNDNIFSQYMYKTLPSGNHSWAFKKQFAIQLALSSFMSFMLQIGGRSPNKILFAKNTGKIFQTDFHPAYDANGLIEFNEPVPFRLTRNMQAFFSHGVEGLIVSSMCAAAQAVASPKQSQHLWHHLAMFFRDELLSWSWRRPLGMPIASMAAGGTMSPVDFKQKVITNVEHVITRVKGIAPQNFSEEEENVMDPPQPVQRGVTELVEAALNPRNLCMMDPTWHPWF

SEQ ID NO: 284464 - protein, 187 aa, Glycine max
  Clone ID: PAT_MRT3847_98897C.1.pep
RRPPTLSTHFCSSVEREVTISVLKQPTPPKGISCVNRANFPPSLSSLKQSTVTTKGSPVHVGTRVDHRSFPKTQNTLAPTMCPPALAPQVMRAGFLTRYHRKKTSLQLQICADQSCLHFCLDLPIPAHHLTTIVALLLSSNTTKLIVPLTDIFLSEILGKKSICGRRNEIKPSRENLRRCFYDGSQP

SEQ ID NO: 284465 - protein, 128 aa, Glycine max
  Clone ID: PAT_MRT3847_98898C.1.pep
PPWKNLPQRYKLIGTTSLAFVICNMDKVNLSIAIIPMSHQFGWNSTTAGLVQSSFFWGYALSQLPGGWLAKIFGGGTVLEVGVLIWSVATAFVPFISGYMPGLLLSRVLVGIGEGVSPSAATDLIARS

SEQ ID NO: 284466 - protein, 41 aa, Glycine max
  Clone ID: PAT_MRT3847_98899C.1.pep
AHGRILTAKERAHQKANPRNSCMNTMTTQKPTRGIASARLS

SEQ ID NO: 284467 - protein, 306 aa, Glycine max
  Clone ID: PAT_MRT3847_9889C.1.pep
NGSIPDALQIFPNSSFEGNSLCGLPLKSCSVVSCTPPSTPVSPSTPARHSSKSKLSKAAIIAIAVGGGVLLLLVALIIVLCCLKKKDNRGSNVIKGKGPSGGRGEKPKEEFGSGVQEPEKNKLVFFEGSSYNFDLEDLLRASAEVLGKGSYGTAYKAILEESMTVVVKRLKEVVVGKKDFEQQMEIMGRVGQHTNVVPLRAYYYSKDEKLLVYDYVPGGNLHTLLHGGRTGGRTPLDWDSRIKISLGTAKSLAHIHSVGGPKFTHGHINAPLARLFLGCGRCISDFGLSPLMNGPATTFRAASYRA

SEQ ID NO: 284468 - protein, 61 aa, Glycine max
  Clone ID: PAT_MRT3847_988C.1.pep
GIRPQRLAVAFKFLTTTRQNCFIRPPGAILAPGESIIAIMDMYILQPETSAKPGITGINFQ

SEQ ID NO: 284469 - protein, 32 aa, Glycine max
  Clone ID: PAT_MRT3847_98900C.1.pep
KFQQWAHQILGLFQTPNNFFEKKAKKGFPVPF

SEQ ID NO: 284470 - protein, 30 aa, Glycine max
  Clone ID: PAT_MRT3847_98901C.1.pep
DKAEGMRHTIDADIATILTMTRVEAINAIS

SEQ ID NO: 284471 - protein, 98 aa, Glycine max
  Clone ID: PAT_MRT3847_98902C.1.pep
VPRYHKIKQSRWYEQYQVIQTTRLCINIPSEHQVVLPEQRSRCKAEASGRQDWLSTDLNVVYLSLNCDAVRCSSLMPCKAPQAYLREYPSPSNPCPQP

SEQ ID NO: 284472 - protein, 69 aa, Glycine max
  Clone ID: PAT_MRT3847_98903C.1.pep
SNTELSACFIYQKYIQILEEKGNIRSQDIWGRNIIYAQINNEGGALETQLTVIGRPKSLKYLGYLVVCL

SEQ ID NO: 284473 - protein, 124 aa, Glycine max
  Clone ID: PAT_MRT3847_98904C.1.pep
MGPPHRKVGRNKEERRVDREYDDDVVLVPCDNDCNCDCCLSGSESDDSDWSIGWLEPLASDFRSNGDDGFAVLVPCYKPSCCKVVEEASNKALLGVIKNLSNEFSSAGKNYMEQWLASLQNFEA

SEQ ID NO: 284474 - protein, 54 aa, Glycine max
  Clone ID: PAT_MRT3847_98905C.1.pep
HLIPKGTMGEIHGSMMLFLGVHASLHPLNVNHVFSNFNYWGDHYSGSEHGELFF

SEQ ID NO: 284475 - protein, 174 aa, Glycine max
  Clone ID: PAT_MRT3847_98906C.1.pep
MAFSQVITTLLFALAIARISPSACQTVEGKVSCTDCADNYDFSGIKVSVKCEGVKNLAMATTEDKGFFQVDLPSDQTKPPSVNCFTKLLGGPNTNLYASKKNLVSQIVKGKEKNTYTISTPRGFFTSCPQNTECKAANYNQFGSSKTFDLPLPREWGLAPSSFYVPFFPIIGIP

SEQ ID NO: 284476 - protein, 63 aa, Glycine max
  Clone ID: PAT_MRT3847_98907C.1.pep
LGTILLRPIGKVKQSSLYIHKPLTEQCQSDGEISGCITRQTIDELFDPSSPFYSTCAQLLNSH

SEQ ID NO: 284477 - protein, 105 aa, Glycine max
  unsure (1)..(105): unsure at all Xaa locations
  Clone ID: PAT_MRT3847_98908C.1.pep
MSALCLTNVIYGFSGTLTEPVEKTGDQIKEMELKVHPKLRQPLTALCSDPNTTVVVLSGSGRQVLDDNFKEYDMWLAAENGMFLHASXGEWMTTMPEHLNMEWVD

SEQ ID NO: 284478 - protein, 83 aa, Glycine max
  Clone ID: PAT_MRT3847_98909C.1.pep
MFLQEGFAFAHCTTCKAPYHLSVHSAYRQWRTFKLRFFVTRDILFIFLVVQHVDGYEQYWLRLVGGFGSELSFYYICGKLLWT

SEQ ID NO: 284479 - protein, 125 aa, Glycine max
  unsure (1)..(125): unsure at all Xaa locations
  Clone ID: PAT_MRT3847_9890C.1.pep
MMDSKGALPQVQEIEQEGVGGGTNKKMEVKNETKKKKKKRSSYFPRFGCFRIEHDASGEGFDIEVVDESGXHPPPPHLILMINGLRSNAPNWKIAAXPFLKRYPKELLNIAGNQILPSWNFDRVD

SEQ ID NO: 284480 - protein, 43 aa, Glycine max
  Clone ID: PAT_MRT3847_98910C.1.pep
AIFSILGDTLNYYNLQLFSLKSFSNINIIYRLKCNHTLKLSIL

SEQ ID NO: 284481 - protein, 62 aa, Glycine max
  Clone ID: PAT_MRT3847_98911C.1.pep
CSLAWRASSMANAIAHSGFLYKEAKQALLNLSTGVMCHGNERVNKCVFMGNGSADRRMAMNA

SEQ ID NO: 284482 - protein, 62 aa, Glycine max
  Clone ID: PAT_MRT3847_98912C.1.pep
ARERECSLFLGYSGEQISIGNDGVGPVALRIRATWVRPSGSGVRIPPRPQRAKKGEDFSLWG

SEQ ID NO: 284483 - protein, 101 aa, Glycine max
  Clone ID: PAT_MRT3847_98913C.1.pep
GELWGVKGLTPKFISCKRGPKNPVVVVRPPPEGGFGPPPWPPLGTKLFSWGGKFFNFFRPLPAPKKTGGGSPPPPGFFFFFGPFSEPLFWGFYFFSGGIFL

SEQ ID NO: 284484 - protein, 63 aa, Glycine max
  Clone ID: PAT_MRT3847_98914C.1.pep
ELIKSLVNIVLIIVMTKILNSKGVALLSHFMISKAMDLGRNLDCGSGFIIVVYGFQYFLFFYP

SEQ ID NO: 284485 - protein, 117 aa, Glycine max
  Clone ID: PAT_MRT3847_98915C.1.pep
SFVYSFYFFFLFFFFFFFFFFFFFFKPGGGRGGPPGKPGPGPGGEPFFPKRSQKKLGGTTGKTPPGGKKESGNNPQQHTSGNQKGQSRGGQRRDQTKKNGGGPTAPIQTGKPDRPAA

SEQ ID NO: 284486 - protein, 57 aa, Glycine max
  Clone ID: PAT_MRT3847_98916C.1.pep
FCLSFILKFSLGFYFFPDYYRVSYMPLQFESYELCIPFCASNWVVCQVVETLICTFT

SEQ ID NO: 284487 - protein, 144 aa, Glycine max
  Clone ID: PAT_MRT3847_98917C.1.pep
RTRGGFLERTKEKGMVVRDWAPQAAILSHDSVGGFVTHCGWNSVLEAVCEGVPMVAWPLYAEQKLNRVILVEEMKVGLAVKQNKDGLVSSTELGDRVMELMDSDRGKEIRQRIFKMKISATEAMSEGGSSVVTLNRLVDIWREH

SEQ ID NO: 284488 - protein, 89 aa, Glycine max
  Clone ID: PAT_MRT3847_98918C.1.pep
MAWRCGSLSRSVLSAARTIPTRSSISPLSPSLRSHLLHSRRPLNTLPRTVGILVCTHSLMPLHSADASARLTSHISVESRACCELSQGT

SEQ ID NO: 284489 - protein, 128 aa, Glycine max
  Clone ID: PAT_MRT3847_98919C.1.pep
DGYEYHVDYEVQGVSMVLDEDENSEGHKTSEICEIDESSENRYASLENDDDNGISQENQIHSSEVPDESTICVHEQKLSDENQVKGSKVPSTGGSEEQLTGNNMQCGTKRKRPIEEDEELRKINSRKP

SEQ ID NO: 284490 - protein, 149 aa, Glycine max
  Clone ID: PAT_MRT3847_9891C.1.pep
TSLKDPQIALRATVFFCFNPASIFYSSIYSESLYALLCFGGMYHFMSGGNNLAVLFFALSGCARSNGVLNAGYLCFQTMHRAYHAMFQEKRVTLALQIVIAGALRTACIFAPFVAFQAYGYYNMCVGRSPDEIRPWCKARIPLLYNYIQ

SEQ ID NO: 284491 - protein, 106 aa, Glycine max
  Clone ID: PAT_MRT3847_98920C.1.pep
LLLIWKYEVVAVPVFGRVGCGDKFRFWEDSWAGNDRTLMAKYPRLYQVSNQQQQTINCMGGHNAAGWDWNFSGRRPLFEIEIAMAADFLEETAQLTIHQNTTDSWI

SEQ ID NO: 284492 - protein, 114 aa, Glycine max
  unsure (1)..(114): unsure at all Xaa locations
  Clone ID: PAT_MRT3847_98921C.1.pep
MSGITTHPRIPPVVMDNITQQIGNTPLVRLNKIPQSLGIEATVYVKDEAFNAGGSVXDRIALRMIEAAEREGRIKPGDTLIEPTCGNTGIGLALVAAVKGYKTIITLPETMSPE

SEQ ID NO: 284493 - protein, 73 aa, Glycine max
  Clone ID: PAT_MRT3847_98922C.1.pep
NGSPVFKGVPFNPPKKVVYVFKKEQKPPPPIFFNPNIKFSKPIHHLKSKGWVNFPEGKTRWNKGNILGLPPGI

SEQ ID NO: 284494 - protein, 99 aa, Glycine max
  Clone ID: PAT_MRT3847_98923C.1.pep
RRDRTGVRRRQTGTEMALKGGHVSGGPFMELVTENAFLYLCFSRLPNGVEMCRSDFKMPKFVVIGHSGFGLNVLEFYDRRMRAIKEYTILVLKKKSLFS

SEQ ID NO: 284495 - protein, 267 aa, Glycine max
  unsure (1)..(267): unsure at all Xaa locations
  Clone ID: PAT_MRT3847_98924C.1.pep
MPQGDYIEXHRRDYGYRLDHFERKRKKEARQVHKRSSIAQKXLGIKGKMIAKKNYAEKVXTMKKTLAMHEESTSRRKTDDNVQXDGAVPAYLLDRDNTTRAKVLSNTIKQKRQEKXGKWDVHLPKVXPWLKDEMLKEDRNGKXRFIRPTGLRFTKAHVTHPELKCTFNLELIGVKKNPNGPMYTSLGVITKGTIIEVNVSELGLVTPAGKVGPIYTSLGVITRGTIVGVNVSELGLVTTTGTDVWGKYAQVTNNPENDGCINAVLLV

SEQ ID NO: 284496 - protein, 260 aa, Glycine max
  Clone ID: PAT_MRT3847_98925C.1.pep
MPQGDYIERHRRDYGYRLDHFERKRKKEARQVHKRSAIAQKALGIKGKMIAKKNYAEKAQMKKTLAMHEESSSRRKTDDNVQDGAVPAYLLDRDNTTRAKVLSNTIKQKRKEKAGKWDVPLPKVRPVAEDEMFKVVRTGKRKTKQWKRMVTKATFVGPGFTRKPPKYERFIRPTGLRFTKAHVTHPELKCTFNLELIGVKKNPNGPMYTSLGVITKGTIIEVNVSELGLVTPAGKVVWGKYAQVTNNPENDGCINAVLLV

SEQ ID NO: 284497 - protein, 261 aa, Glycine max
  Clone ID: PAT_MRT3847_98926C.1.pep
LQPQGDYIERHRRDYGYRLDHFERKRKKEARQVHKRSSIAQKALGIKGKMIAKKNYAEKAQMKKTLAMHEESTSRRKTDDNVQDGAVPAYLLDRDNTTRAKVLSNTIKQKRKEKAGKWDVPLPKVRPVAEDEMFKVVRTGKRKTKQWKRMVTKATFVGPGFTRKPPKYERFIRPTGLRFTKAHVTHPELKCTFNLELIGVKKNPNGPMYTSLGVITRGTIIEVNVSELGLVTPAGKVVWGKYAQVTNNPENDGCINAVLLV

SEQ ID NO: 284498 - protein, 76 aa, Glycine max
  Clone ID: PAT_MRT3847_98927C.1.pep
NVVLASTCERSRSKAAGIECLQDQGEADDIPQVRFSHRLTPCSSKRVRVSDDILYSIIIHCTILYNQATYIRHFDR

SEQ ID NO: 284499 - protein, 68 aa, Glycine max
  Clone ID: PAT_MRT3847_98928C.1.pep
SFLSVSESFGGCLVGLTLTPKGVAGVVTVVAEAPPLICKRGENATTVIIHLCAPVYHLHHIHGRVTSA

SEQ ID NO: 284500 - protein, 44 aa, Glycine max
  unsure (1)..(44): unsure at all Xaa locations
  Clone ID: PAT_MRT3847_98929C.1.pep
SRHYHVLAXQELTKEYVVEDREHVKNVPELDPSHVTELRMLGLY

SEQ ID NO: 284501 - protein, 135 aa, Glycine max
  unsure (1)..(135): unsure at all Xaa locations
  Clone ID: PAT_MRT3847_9892C.1.pep
MAAVAAASAELLIIGWYIFRVLLQVFLECCIYWVGFAFRNPPGTQPIARSEVFRYSLQKLAYTASRTXGRQVLGERXSEPPTEAPAPSPGRPYHQVLLCISXAREPVPRRNXGPLCSLARGALGKVSEGPIDLRR

SEQ ID NO: 284502 - protein, 419 aa, Glycine max
  Clone ID: PAT_MRT3847_98930C.1.pep
MNQLGGVSVILLVLSVLCFHVRAQTSAPSSGDAVSNFQPSLAVVIGILGVMFLLTFFLLMYAKFCHRRHGGASAVGDSENQLTFVRSRSRFSGIDKTVIESLPFFRFSALKGLKEGLECAVCLSKFEDVEILRLVPKCKHAFHIDCIDHWLEKHSTCPICRHRVNPEDHTTFTYSNSLRMLAGEESNIEILVQREEEEHHGSSRFSVIGSSSFRKTVKEEELLIQKGAEDSDGNQKGYHKHNHRITISDVVFKHRWSNVSSSDLMFLNSEMLNDTSSNRFSSNLESITRGVVVENEQIMNIKEEMERKISFENKVVGALNNIVSDHKEDPPFTSDSAPKYVNPGEKRSMSEITAVSRFGDLGMKMRVLKDSDSLQNNLKEERMRQIWFPIARRTAQWFVNREERRSLQSQNNKQQPLDV

SEQ ID NO: 284503 - protein, 65 aa, Glycine max
  Clone ID: PAT_MRT3847_98931C.1.pep
HLKKCTQIVLLVRRQWSLSYPCHACCSFCYQRASSIFQDQQMNWSHSWSRRHASQNYRTTGTLGG

SEQ ID NO: 284504 - protein, 88 aa, Glycine max
  Clone ID: PAT_MRT3847_98932C.1.pep
FAGANEPPYIQWDTSNEICRSGFFLPWGGCQLLPSDISYETASSNGFHRMWLFTKRSSSNWFQILVTIPMLTTSGPETVPITTSGLFP

SEQ ID NO: 284505 - protein, 67 aa, Glycine max
  Clone ID: PAT_MRT3847_98933C.1.pep
FQRKFNLPPASLENGFGLKKKEKTKGARLFFVLQNNFCFRGILNFMSRVVFYGRNKKKKHPPPPWRL

SEQ ID NO: 284506 - protein, 46 aa, Glycine max
  Clone ID: PAT_MRT3847_98934C.1.pep
NWNSPRNPDLISLGSSIALLRNQIIPIHTSTFLHPNFLKMCNWNSP

SEQ ID NO: 284507 - protein, 81 aa, Glycine max
  Clone ID: PAT_MRT3847_98935C.1.pep
LLVRVRVLKGKKITLCAGHRLRESFSFPLLVYLLNTLLFDIGLRVRFKLVLFLSQVSVQFQVQAGEILDLCFPLSYQVLGL

SEQ ID NO: 284508 - protein, 73 aa, Glycine max
  Clone ID: PAT_MRT3847_98936C.1.pep
FQEFLNFFLLLCVRFLKGKKITLCAGHRLRESFSFPLLVYLLNTLLFDIGLRVRFKLLLFLFSVLCSISSSSW

SEQ ID NO: 284509 - protein, 74 aa, Glycine max
  unsure (1)..(74): unsure at all Xaa locations
  Clone ID: PAT_MRT3847_98937C.1.pep
DITFGPTYYHTLLVGSPSCIKIGLKKGPWTPEEIQNLFHPFQNLGLGSXEALPKLAGPIKFGKSGRPRGPNFLR

SEQ ID NO: 284510 - protein, 153 aa, Glycine max
  Clone ID: PAT_MRT3847_98938C.1.pep
MSLIPSFFGGRRSSVFDPFSLDVWDPFKDFPFPSSLSAENSAFVSTRVDWKETPEAHVFKADIPGLKKEEVKLEIQDGRVLQISGERNVEKEDKNDTWHRVERSSGKFVRRFRLPENAKVDQVKASMENGVLTVTVPKEEIKKPDVKAIDISG

SEQ ID NO: 284511 - protein, 82 aa, Glycine max
  Clone ID: PAT_MRT3847_98939C.1.pep
DTLIPKPQKALRQNQEQPMRMFCVMDFSNSESSTASTTSCTPSSSMAPPASPPAPCYICDKMEELESICKPIIAKMYQHPGT

SEQ ID NO: 284512 - protein, 262 aa, Glycine max
  Clone ID: PAT_MRT3847_9893C.1.pep
MVFSSLRRYFSMRHQSSKVQALYEHCKTILSPSGSPPPSSQALQKLSSILDTIQPADVGLKEEIADDDRGHGFFGANALSRLARWAQPITYVDIHECDSFTMCIFCFPTSSVIPLHDHPGMTVFSKLLYGSLHVKAYDWVEPPCIIESKEPGYAQVRLAKLAVDKVLNAPCDTSVLYPKHGNLHCFAAVTPCAMLDILTPPYREEEGRSCTYYHDYPYSAFSVANAPICDGEEEEYAWLTELESPSDLYMRQGVYAGPAIQL

SEQ ID NO: 284513 - protein, 43 aa, Glycine max
  Clone ID: PAT_MRT3847_98940C.1.pep
KRKNMRKITLLMNFFTFSYYFYIKYFFYFNFLIILVIKKRINI

SEQ ID NO: 284514 - protein, 84 aa, Glycine max
  Clone ID: PAT_MRT3847_98941C.1.pep
FRGRPHPSANSSGLPPPLLLEGLKDLRRGFLQGKSLIALPSLSMCKMLLKSLESALPPGGQNWNLFVLPSCKILKGIPVSYLLA

SEQ ID NO: 284515 - protein, 54 aa, Glycine max
  Clone ID: PAT_MRT3847_98942C.1.pep
GEKAPQSTARGALSFLLLERLKKYLIEGSCSAYSRGSSDYNRSIDGGRMPFEEQ

SEQ ID NO: 284516 - protein, 53 aa, Glycine max
  Clone ID: PAT_MRT3847_98943C.1.pep
NVKAKIQGKEGISPDPQRLFFAGKQLEDERPLGAYNIKKEFTLPLVLRLRGGF

SEQ ID NO: 284517 - protein, 57 aa, Glycine max
  Clone ID: PAT_MRT3847_98944C.1.pep
KTLSHPHMLPSINHNIKGDLNIYIYIYFISFYLSPFFPKQNNYHKSSRDAHISSIAN

SEQ ID NO: 284518 - protein, 84 aa, Glycine max
  unsure (1)..(84): unsure at all Xaa locations
  Clone ID: PAT_MRT3847_98945C.1.pep
KXNRPAIMSLFHEFVSSFWAPLTVTFPFFPAHRQHIRTQIKMMYMFTLQNFFFFFCEHGPVFSPKKAIAXHTWLAFDSGPSSLF

SEQ ID NO: 284519 - protein, 56 aa, Glycine max
  Clone ID: PAT_MRT3847_98946C.1.pep
HFHLLCYTLISIIQPQLHHSLLSTREYLHKACFSVSINHIVIFSIHVHGNRCVKLC

SEQ ID NO: 284520 - protein, 84 aa, Glycine max
  unsure (1)..(84): unsure at all Xaa locations
  Clone ID: PAT_MRT3847_98947C.1.pep
HGLPLTSGSSKQSFCKFSIDLLGGRKLEDTTGDWNTXIQNFTISNWRRVDVRKRGXVMIKIARSVKATCSKSDCPDSTSIANEH

SEQ ID NO: 284521 - protein, 74 aa, Glycine max
  Clone ID: PAT_MRT3847_98948C.1.pep
LCADYEIGVEKAIAVLSTDFPNYYAIHYEIICSTLSYEIYNFVKYSNLYNIFSNSLNNFNLNLLKFCIIAHTIL

SEQ ID NO: 284522 - protein, 129 aa, Glycine max
  unsure (1)..(129): unsure at all Xaa locations
  Clone ID: PAT_MRT3847_98949C.1.pep
LGELARFWKGGCFIRAVFLARIKKAYQRTPILASLIVAPEFPREMVQNQLSXKRFLGLPFSPGISPPGMCASLAFFDPYRRARLPATFVQAQRDFFGAHPYKRVVPPGAFHPEWAKLPPNSGAGVGAPN

SEQ ID NO: 284523 - protein, 97 aa, Glycine max
  Clone ID: PAT_MRT3847_9894C.1.pep
NFLRPSPSLLCFSLHLHFRLSIQFNSSFWCRNSVQIIKPYLTSPVLLLLPLPSSSSSSFQISGRNRFLFILCFVFHVREDKPTLSFSRCDSMFSCLS

SEQ ID NO: 284524 - protein, 44 aa, Glycine max
  Clone ID: PAT_MRT3847_98950C.1.pep
RVNFIFSSRYASLQLTTNCYTLTLMLCCGIGTEGWRDSCLELGI

SEQ ID NO: 284525 - protein, 52 aa, Glycine max
  Clone ID: PAT_MRT3847_98951C.1.pep
PRVRPRLRAAAKRQQKGVLVCDCLPLQLILIFLLRCVCVRSLSYMKKALLPW

SEQ ID NO: 284526 - protein, 133 aa, Glycine max
  Clone ID: PAT_MRT3847_98952C.1.pep
MVRPHRPGRETRGETRARPRVCAGARKRHKRAPGKKPQKGTASKKPQKGSASKKPQKGSASKKPQKGSAARRRQKGTAARRRQKGTAARRRQKGTAARRRQKGTAARRRQKGTAARRRQKGTAARRRQKGTGT

SEQ ID NO: 284527 - protein, 83 aa, Glycine max
  Clone ID: PAT_MRT3847_98953C.1.pep
KILSCIHRYVNLQYGSGGQGTCLINPGGGLPRSQTIFRKGGGVFFFKNPNKTFFSGEKKLHGLQTKQKQAPAVCFFLKKNTVN

SEQ ID NO: 284528 - protein, 468 aa, Glycine max
  Clone ID: PAT_MRT3847_98954C.1.pep
MFSSAISPKPFLRSLVIDRYAQSTTTATRWECLGFNKSENFSTKRELCAEGFKLNCLVENREMDVESSSSSSLVDDASLSLSEEDLGEPSISTLVMNFESKFDPFGAISTPLYQTATFKQPSAIENGPYDYTRSGNPTRDALESLLAKLDKADRALCFTSGMAALSAVVRLVGTGEEIVAGDDVYGGSDRLLSQVVPRTGIVVRRANTCDLNEVAAAIGPKTKLVWLESPTNPRLQISDIQKISEIAHSHGALVLVDNSIMSPVLSRPLELGADIVMHSATKFIAGHSDIMAGVLAVKGEKLGKELYFLQNAEGSGLAPFDCWLCLRGIKTMAPRIEKQQDNAQKIAEFLASHPRVKKVNYAGLPGHPGRDLHYSQAKGAGSVLSFLTGSLELSKHIVETTKYFSITVSFGSVKSLISMPCFMSHASIPAAVREARGLTEDLVRISVGIEDVSARIADLDNALRTGPL

SEQ ID NO: 284529 - protein, 288 aa, Glycine max
  unsure (1)..(288): unsure at all Xaa locations
  Clone ID: PAT_MRT3847_98955C.1.pep
MWHEARRSEKKVHDMMDAARKRAQRRAVYLAKRRGDPQQSIQLVGFPSRTYRDDALYQASQDQQGLIPWNGKQDVLIDRFDGRALLDFVRDSSHRRAPEKSEEEEELEEFVNFERYRDLIKHRRRGXVTDEEALEHVNQEMEAKAAAPFTSDRSNLLQPAASKGSYSQVRFSYDGNGKENSXSDDEDXDNEEDEDDEDDEDFNRDDSIDEGMEIIAKEYGVKRYGWLVYMDKKAKEEEKRQKELIKGDPAIRKLSRKERRKASQIEREREREATRISGTRVLHHDPYR

SEQ ID NO: 284530 - protein, 75 aa, Glycine max
  unsure (1)..(75): unsure at all Xaa locations
  Clone ID: PAT_MRT3847_98956C.1.pep
WKAYKSMADISTQHKVLSLQPSPMRSSSSTNESCRMHRHQAMGPHVVIFEQSAYSRQLGXPFCRLLASSTSRPHV

SEQ ID NO: 284531 - protein, 84 aa, Glycine max
  unsure (1)..(84): unsure at all Xaa locations
  Clone ID: PAT_MRT3847_98957C.1.pep
PRKVSPKRKALVGAPKMARTQVLKGFWASIRASIFRAPSAKGALNWXRTLKRCFQGKSKFXMLKIARLISPPFLKSESESWVFV

SEQ ID NO: 284532 - protein, 83 aa, Glycine max
  Clone ID: PAT_MRT3847_98958C.1.pep
RQLGSLWAAALFPVVWAAVSSCLCALLTRHCFHPLASVPCSICVSHELQVHSLWTYPNFGWSALEFGLPSVLWGPSVYASPFA

SEQ ID NO: 284533 - protein, 243 aa, Glycine max
  Clone ID: PAT_MRT3847_98959C.1.pep
RIIHRDLKTSNILVDSNWDPKISDFGLARSFLEDQFEAKTNRVVGTYGYMPPEYAVRGNFSVKSDVFSFGVIILEIVSGKKNREFSDPEHCHNLLGHAWRLWVEERALDLLDKVLEEQCRPFEVIRCIQVGLLCVQRRPEHRPDMSSVVPMLNGEKLLPEPTVPAFYNETIITEVNCKLCSSNEKKKGGRRLAEPVIPAIRCKIEYRGNKMSTLLSFVIGLMNMSSYISKHLIEINKRFYKLH

SEQ ID NO: 284534 - protein, 158 aa, Glycine max
  unsure (1)..(158): unsure at all Xaa locations
  Clone ID: PAT_MRT3847_9895C.1.pep
SLLIHDLADTIQPADVGLKEEIADDDRGHGFFGANALSRLARWAQPITYVDIHECDSFTMCIFCFPTSSVIPLHDHPXMTVFSKLLYGSLHVKAYDWVEPPCIIESKEPGYAQVRLAKLAVDKVLNAPCDTSVLYPKHGGNLHCFTAVTPCAMLDILT

SEQ ID NO: 284535 - protein, 42 aa, Glycine max
  Clone ID: PAT_MRT3847_98961C.1.pep
RVIVSLRDWVIFLYKHFSKLHFYTGFFKNKNYKLFNIFHKNK

SEQ ID NO: 284536 - protein, 111 aa, Glycine max
  Clone ID: PAT_MRT3847_98962C.1.pep
HDVPNVAALCSPTLETVLTVFAASVTGRMLEPPSLSILSLWSPLKVCTLRPATGLAMPMAPLCLHRYKCLRLSTTRRRTTVLMAARTPTRRRAASLRKARPHCLSEGQDEI

SEQ ID NO: 284537 - protein, 54 aa, Glycine max
  Clone ID: PAT_MRT3847_98963C.1.pep
SHLLCLKMTQYQPNSLSNSFTIVSKMYKLFSKCSAKQKSNVSSPILMSNPFSIL

SEQ ID NO: 284538 - protein, 43 aa, Glycine max
  Clone ID: PAT_MRT3847_98964C.1.pep
AKGGVHNNITTRRLKGLQCLCVNEKILTNVKTKNISLVHNTTT

SEQ ID NO: 284539 - protein, 91 aa, Glycine max
  unsure (1)..(91): unsure at all Xaa locations
  Clone ID: PAT_MRT3847_98965C.1.pep
HIAVKFSEILTKIDRRSGKXXXXKXPKFLKNGDAGMDXMXPTXPMVXEXFXXYXPXGRFAVRDMXRXTVXVGVIKSVXKXDPTXXKVXXAA

SEQ ID NO: 284540 - protein, 90 aa, Glycine max
  unsure (1)..(90): unsure at all Xaa locations
  Clone ID: PAT_MRT3847_98966C.1.pep
TRLLSWASCYRLTGDSSKHIVFWHRSKIIRWDSFLLPGAKLSALVRSQSPPIXQPIFCILIMLYVGFFFLSLRAFRCNLFFDALVGCDRN

SEQ ID NO: 284541 - protein, 284 aa, Glycine max
  Clone ID: PAT_MRT3847_98967C.1.pep
MEFQKPLWLFLLLLTLLSSSQANKFNVGGSKGWVPNPSESYNNWAGRNRFQINDTIVFKYNKGSDSVLEVKKEDYDKCNKTNPIKKFENGDTEFKFDRSGPFYFISGKDGNCEKGQKLIVVVLTPRTPPTPKTPPFPKTSPSPSPSQSPKANPPTVSPPLPSPSPSVHSKSLSPASSPVPAVGTPAISPAISIPTLAPETGTPPPSLGPSSSSPPSPGPSSSSPPSPGPSSSSPPPAGPTSPPSLAPSSNSTAPSPKNSGFSVAPSSVLMYCVTIVAGAALLRY

SEQ ID NO: 284542 - protein, 196 aa, Glycine max
  unsure (1)..(196): unsure at all Xaa locations
  Clone ID: PAT_MRT3847_98968C.1.pep
MSTHSTLDIVVNDILRVVTPVQEDWEIRFAIINDLRSIVESVESLRVDITEPNVACCRPSKGATVEPFGSFVSNLFTRWGDLDISIELSNGLHISSAGKKQKQTFLGDVLKALRMKGGGSNLQFISNARVPILKFKSYRQGVSCDISINNLPGQMKSXRFCFWINKIDGXRFRHMVLLVKEWAKAHKINNSKAGTF

SEQ ID NO: 284543 - protein, 268 aa, Glycine max
  unsure (1)..(268): unsure at all Xaa locations
  Clone ID: PAT_MRT3847_98969C.1.pep
MGRWRPSTLVFTILSAPIIIIIALLSSGGTTTVEDVDNDHTMAVTGLLHTDSRWILNQDGQRVKLACVNWVSHLEAVVAEGLSKKPVDVISKGIKSMGFNCVRLTWPIVLVTNDSLASLTVRRSFQSLALLESIAGVQTNNPSIIDLPLIQAFQAVVKSLGDNDVMVILDTHMTHPGWCCSNLDGNGFFGDKFFDPKQWIWRLTKMATLFKGVTAVVGISLRNELRGSRQNVNDWYKYMVKGAEAAHAAXPDVLVILSGLNFDTDLSF

SEQ ID NO: 284544 - protein, 43 aa, Glycine max
  Clone ID: PAT_MRT3847_9896C.1.pep
WMILNVNLFYNCMLDVNIFLRRQWWFRSYREERKVYMLNGFCS

SEQ ID NO: 284545 - protein, 415 aa, Glycine max
  Clone ID: PAT_MRT3847_98970C.1.pep
MSTHSTLDIVVNDILRVVTPLQEDWEIRFAIINDLRSIVESVESLRGATVEPYGSFVSNLFTRWGDLDISIELSNGLHISSAGKKQKQTLLGEVLKALRMKGGGSNLQFISNARVPILKFKSYRQGVSCDISINNLPGQMKSKILLWINKIDGRFRHMVLLVKEWAKAHKINNSKAGTFNSYSLSLLVIFYFQTCIPAIFPPLKDIYPGNMVDDLIGVRSDAENLIAQTCDANINRFISNRARSINRKSVAELFVEFIGKFAKMDSMAVKMGICPYSGKWEQIEDNMIWLPKTYAIFVEDPFEQPQNTARSVSAGQLKKITEAFARTHDLLTSTNQNQISLLSNMAPAHVIRCITRPYGGGYFHPTQPQVQRAIRPQLQSQRHFQNVSQGTSSNSSSSKGHTLVHRGQQIWRPKS

SEQ ID NO: 284546 - protein, 452 aa, Glycine max
  Clone ID: PAT_MRT3847_98971C.1.pep
MSTHSTLDIVVNDILRVVTPVQEDWEIRFAIINDLRSIVESVESLRVLIRVLLYLFTISTHDHICWLEVDITEPNVACCRPSKGATVEPFGSFVSNLFTRWGDLDISIELSNGLHISSAGKKQKQTFLGDVLKALRMKGGGSNLQFISNARVPILKFKSYRQGVSCDISINNLPGQMKSKILLWINKIDGRFRHMVLLVKEWAKAHKINNSKAGTFNSYSLSLLVIFYFQTCIPAIFPPLKDIYPGNMVDDLIGVRSDAENLIAQTCDANINRFISNRARSINRKSVAELFVEFIGKFAKMDSMAVKMGICPYSGKWEQIEDNMIWLPKTYAIFVEDPFEQPQNTARSVSAGQLKKITEAFARTHDLLTSTNQNQISLLSNMAPAHVIRCITRPYGGGYFHPTQPQVQRAIRPQLQSQRHFQNVSQGTSSNSSSSKGHTLVHRGQQIWRPKS

SEQ ID NO: 284547 - protein, 70 aa, Glycine max
  unsure (1)..(70): unsure at all Xaa locations
  Clone ID: PAT_MRT3847_98972C.1.pep
LVRIRVESSTRISGLSYSQFRCPLMEPRLRRASAYMDKSNLDDSDRIYDVIVIELYATYNPTLXEACSGV

SEQ ID NO: 284548 - protein, 53 aa, Glycine max
  Clone ID: PAT_MRT3847_98973C.1.pep
IIGGSSTVTCLPLLRFFNYDESVRRVTLCIIAPPHLDLGLHKTNTSRCVVSAA

SEQ ID NO: 284549 - protein, 49 aa, Glycine max
  Clone ID: PAT_MRT3847_98974C.1.pep
VSAVIVPLSFSVSFHEMRRSTSPTLTQMDKNTSIPPQILSFLPFIIFPI

SEQ ID NO: 284550 - protein, 79 aa, Glycine max
  unsure (1)..(79): unsure at all Xaa locations
  Clone ID: PAT_MRT3847_98975C.1.pep
FGEIQEKVVLKFSQEEFLTAWSTQVRPATTLLADGCPYSYAMVHDSSVSTIPGDFAIGVKLTTIYNMSAYXGLNPGLSG

SEQ ID NO: 284551 - protein, 60 aa, Glycine max
  Clone ID: PAT_MRT3847_98976C.1.pep
MASIDKVRTAKPNTCEAKIIQCSRSTTMNEDDSFIDTGSGEIYNHEQLRKQLTHHKKRTG

SEQ ID NO: 284552 - protein, 56 aa, Glycine max
  Clone ID: PAT_MRT3847_98977C.1.pep
SIYYYNNPSFPNPPSCQISYIEHFHSTITNSFITTIAPPLITYITNTATEAAQTLL

SEQ ID NO: 284553 - protein, 52 aa, Glycine max
  Clone ID: PAT_MRT3847_98978C.1.pep
MGDPAERLGSEGLEGGAFVKTDDLCMEIDPPFQENVATAEDWRKALNRVVLA

SEQ ID NO: 284554 - protein, 182 aa, Glycine max
  Clone ID: PAT_MRT3847_98979C.1.pep
MESPSRSFVIIVGAGVSGISAAKLLAENGVKDLVILEASNCIGGRIRKENFGGVSVELGAGWIVGVGGFESNPIWELVAEYGLRTCFSDYTNVPYNIYDRSGKIFSSGIAADSYKKAVDSAIRNLTNQEEADREGNSSKTTEPPSSPLELAIDFILHDFEMAEAVPISTFTAFGEREFLVAD

SEQ ID NO: 284555 - protein, 35 aa, Glycine max
  Clone ID: PAT_MRT3847_9897C.1.pep
SGRTVNSQTSLFDLECSAVLLIREWTQICGVGKIM

SEQ ID NO: 284556 - protein, 31 aa, Glycine max
  Clone ID: PAT_MRT3847_98980C.1.pep
YKTIRVCTHFKSKWDLFLQKLKDIFTTTNMI

SEQ ID NO: 284557 - protein, 46 aa, Glycine max
  unsure (1)..(46): unsure at all Xaa locations
  Clone ID: PAT_MRT3847_98981C.1.pep
NNMIMAGIRGGRRHILLHDNYRVPDERHQLVAGGFHXGPKVYRLHA

SEQ ID NO: 284558 - protein, 85 aa, Glycine max
  Clone ID: PAT_MRT3847_98982C.1.pep
SRQTHESHRGQLHLGLDASSRPTVKPLYTPLFRSPLERLTLSVPMLSTTYCRTLTTPPPTDMYTTPPAYTRSSTPSAYGWTRPAC

SEQ ID NO: 284559 - protein, 48 aa, Glycine max
  Clone ID: PAT_MRT3847_98983C.1.pep
SHYLQLIFVLNSFMKLAFFLQFMVLFVGIIHIFMFSLILYSRYSHSVN

SEQ ID NO: 284560 - protein, 78 aa, Glycine max
  Clone ID: PAT_MRT3847_98984C.1.pep
NLQASRPRLFNVYIDVHREKDVDLDILLVCDDSNILKWTVLIKGPSETSYEGGMIQIAFSVPEHYPLQTPLVPFLTQI

SEQ ID NO: 284561 - protein, 119 aa, Glycine max
  Clone ID: PAT_MRT3847_98985C.1.pep
IQKQGGALVPLTKKKTEAFIEPRLKGGDFFQQTGGNPKIKPRKDPLQQHMGFRTPFLKNGPKAPSEGALGQLQVSYHGSSFLGIISDLFSFPQNQGLVKGSGKGFFREGPPFIFFHFKG

SEQ ID NO: 284562 - protein, 164 aa, Glycine max
  Clone ID: PAT_MRT3847_98986C.1.pep
MVECDENVNEAAMSMSMDPRARHAQAITSHIKDRAVWNNLITHYSKSDLSSYAVSLFQRLPFPPNVVSWTALISAHSNTLLSLRHFLAMLRHNTLPNHRTVASLFTTCAALTAVSFALSLHSLALKLSLSQHPFPASSLLSLYAKLRMPLNARKVFDEIPQPDN

SEQ ID NO: 284563 - protein, 87 aa, Glycine max
  Clone ID: PAT_MRT3847_98987C.1.pep
PNKQRGGLFKTFLAPFNSKREPIPTLEIFPKPLGALNFPPKRKNGPRKKKKKNYCMKLEHCYITPKSFFYKYGAFSYLSKRFYQMRS

SEQ ID NO: 284564 - protein, 124 aa, Glycine max
  unsure (1)..(124): unsure at all Xaa locations
  Clone ID: PAT_MRT3847_98988C.1.pep
GTLRQHDFREGASRPPAGSXHQECLNILLDLRSGSKRSLXADPTKHVLALKSWDITSTRPHLLLADGSDPCSRLYDRMMLPTVTSCWTSMSPPPCVNYYXRMHISDHGHTSLHLTHVTYSTDGH

SEQ ID NO: 284565 - protein, 288 aa, Glycine max
  Clone ID: PAT_MRT3847_98989C.1.pep
DNFSTIVSAVAEGRSIYNNMKSFIRYMISSNVGEVISIFLTAALGIPECMIPVQLLWVNLVTDGPPATALGFNPADIDIMQKPPRRNDDPLISSWVLFRYLVIGSYVGLATVGIFVLWYTQASFLGINLVSDGHTIIELSQLRNWGECPSWSNFTIAPFEVAGGRLITFSNPCDYFSVGKVKAMTLSLSVLVAIEMFNSLNALSEENSLRKLPPWRNPWLLVAMSISLGLHCLILYTPFLAEVFGVIPLSLNEWFMVLLISAPVILIDEILKLVVRSHRRLLTKEKEA

SEQ ID NO: 284566 - protein, 90 aa, Glycine max
  Clone ID: PAT_MRT3847_9898C.1.pep
MYRMGMCIVCSGELYRCDSVRFATCEYHLSSVTICACMLGQPGHNYEGCLMFSQTSNSVHDRSCDEQIDLACDYCSIHGSSMLPNARESM

SEQ ID NO: 284567 - protein, 60 aa, Glycine max
  Clone ID: PAT_MRT3847_98990C.1.pep
LVVGRPFLFLFFFLCFFFFFILIRAGSAKKAIDKQSNGMFTKLQLFSIYYGFLKLGSNIL

SEQ ID NO: 284568 - protein, 94 aa, Glycine max
  Clone ID: PAT_MRT3847_98991C.1.pep
LVERMELVAELWEENFKAEFVPTPDPSLTEQYEYANEHGIKCLVIITDTDFSLTGSVKVRHLEHKREKNVEKKNLVKFLSDAMATQFRNPSIWI

SEQ ID NO: 284569 - protein, 103 aa, Glycine max
  Clone ID: PAT_MRT3847_98992C.1.pep
KGGKKKGGKPQNPGKNLVFFGGANKIFKGKKKGTPFWGGDPMQKPFLNPFQGEPQLKTPWKKGPRPKPPFFFPPKKKKGVHPQKLNLFFCLKKRGQIFPFKEP

SEQ ID NO: 284570 - protein, 76 aa, Glycine max
  Clone ID: PAT_MRT3847_98993C.1.pep
EERESFLDGQTILEGASHSWRGDHAHHAYKDIVISQRLWGHLLKIERVASKRDSVNESARLLVCQDWALGLIFHKI

SEQ ID NO: 284571 - protein, 92 aa, Glycine max
  Clone ID: PAT_MRT3847_98994C.1.pep
LWHPQSFKYVGSGFAVASLGLSVKWGGTLHSSNVRPKFPFCWESGKELPFLFFPQKLGLGSELSNTVVPHSKILANRLRRFWLKLENDPVFG

SEQ ID NO: 284572 - protein, 57 aa, Glycine max
  Clone ID: PAT_MRT3847_98995C.1.pep
GWSAFLSFFFFNTDIINISYPFPQKNNFISYRPVLKKEEPVIHIPGTLSGPYFLSRD

SEQ ID NO: 284573 - protein, 55 aa, Glycine max
  Clone ID: PAT_MRT3847_98996C.1.pep
VALGIRRPLWLVRSIGGRPFPTGFLVLGRCPSYSLAMLGIGCFRSGHGLSSFHDG

SEQ ID NO: 284574 - protein, 285 aa, Glycine max
  unsure (1)..(285): unsure at all Xaa locations
  Clone ID: PAT_MRT3847_98997C.1.pep
IRLEQGAYGPVLLSPGVVQFPGWSHYSAPVSPVLSPGAQPTVGATSLYGVTQLSSPTSAFARPYTPLSSTTGPSGSNLKDQFFPERPGEPECQYYLRTGDCKFGLACRYHHPRDHIVARPLLSPVGLPLRPGVQPCAFYLQNGHCKFGFTCKFDHPLGSTRYTXMGSSFIDVPVTPXYPVGSLLSQLAPSTTSSELRPELMSGSKKESLAARISSSGNSSGTSVGLIFSQGGSVSLSNVQLSSQSSXPLSSSRSTRQSREIRECKLENNSLSIGCDFTSLHYFCL

SEQ ID NO: 284575 - protein, 63 aa, Glycine max
  Clone ID: PAT_MRT3847_98998C.1.pep
AHETILSTSESMNDGHPDKHCDQIYDAELDACLEHDPDRMVAGETCTKTSMVMVLREITTMAH

SEQ ID NO: 284576 - protein, 471 aa, Glycine max
  Clone ID: PAT_MRT3847_98999C.1.pep
MDLYGRGQARNGSNPVNQPECRSPGTDTGLEESIWHLTLGSGESYPERPGVPNCVYYMRTGVCGYGSRCRFNHPRDRAAVAAAVRATGDYPERVGEPPCQYYLKTGTCKFGASCKFHHPKNGGGYLSQAPLNIYGYPLRLGEKECSYYLKTGQCKFGISCKFHHPQPAGTSLPTSAPQFYQQVQSPTVPLPEQYGGASTSLRVARPPVLPGSYVQGAYGPVLLSPGVVQFPGWSHYSAPVSPVLSPGAQPAVGATSLYGVTQLSSPTSAFARPYTPLSSTTDPSGSNPKDQFFPERPGEPECQYYLRTGDCKFGLACRYHHPRDHIVARPLLSPVGLPLRPGLQPCAFYLQNGHCKFGSTCKFDHPLGSMRYSPSASSLIDVPVTPYPVGSLLSQLAPSTTSSDLRPELMSGSKKESFSARIPSSGNSSGTSVGLIFSQGGSVSLFDVQLSSQSNAPPNSSRSTRQSGEIR

SEQ ID NO: 284577 - protein, 124 aa, Glycine max
  Clone ID: PAT_MRT3847_9899C.1.pep
GNFTKYNAGLNITHADLIASLTLNDKGDNLTASYYHIVNPLTNSAVGAELSHSFSGNENILTFGTQHALDPLTLLKARVNNYGRASALIQHDWTPRTRFSLVGEVDTGAIEKSAKVGLAVALKP

SEQ ID NO: 284578 - protein, 41 aa, Glycine max
  Clone ID: PAT_MRT3847_989C.1.pep
LQALTAMPSLSIKELVNHSELITLAKRSKPYFLMEPLLSSM

SEQ ID NO: 284579 - protein, 60 aa, Glycine max
  Clone ID: PAT_MRT3847_98C.1.pep
VFNFLLLDCQLNQLNGVKDKLMLVSYSVRSLGVLSGCSFGFICFSRNYLLITLIKKEKRK

SEQ ID NO: 284580 - protein, 176 aa, Glycine max
  unsure (1)..(176): unsure at all Xaa locations
  Clone ID: PAT_MRT3847_99000C.1.pep
DAWGDFAQRSYESVLRKRREELIVSDIDLMYVTNTFELDAISNVLQEAKARNVIQCRYDETYAGVTPQLCDLESGEEDEWRMKDYLHEMDGCIENAIQRLKEXVSIELSKIDARLIRSVSEMQQLEFKLGPICANDYRAILVPVVKLLLWALLEDLAEKDAREKSDAVSEALSAAL

SEQ ID NO: 284581 - protein, 76 aa, Glycine max
  unsure (1)..(76): unsure at all Xaa locations
  Clone ID: PAT_MRT3847_99001C.1.pep
RAGEDDRKGDYGRFCANCYKTNLFGQFRRARTLDAMITPXDKVLVSFSGGPSSRVALXYVHDMQERAHRNFHANRD

SEQ ID NO: 284582 - protein, 55 aa, Glycine max
  Clone ID: PAT_MRT3847_99002C.1.pep
NKEVIYICERETTLSLQWYFWDLFGNYFFHLVKPFFLYGKKGSTYLWWLGFKEIF

SEQ ID NO: 284583 - protein, 67 aa, Glycine max
  unsure (1)..(67): unsure at all Xaa locations
  Clone ID: PAT_MRT3847_99003C.1.pep
NSXXGLEXXIXXSEXWPXXGXASXVTXXXLXRXPLKGHXFQQVXRKPXXQXFWAISKXLSIPXSXXX

SEQ ID NO: 284584 - protein, 73 aa, Glycine max
  Clone ID: PAT_MRT3847_99004C.1.pep
GKKMKTSSLSLTRGTTDSQFIVDKKNSNNLQQDEFTSQVGSYDIPNSEKRNGSIAEATPSTLENDGGTSKIKT

SEQ ID NO: 284585 - protein, 79 aa, Glycine max
  Clone ID: PAT_MRT3847_99005C.1.pep
HLFTAFASQHRPILLPRRPYSVLSPACAFSAFSTVTAYIYGPSRLSSMITLRLRQIESHSCSGENNPLLEIYQYTNMCV

SEQ ID NO: 284586 - protein, 106 aa, Glycine max
  unsure (1)..(106): unsure at all Xaa locations
  Clone ID: PAT_MRT3847_99006C.1.pep
GEDGSKTALGKDEKTVFGRGCGFNTEDXTLSRRHVSLETRTXQTQRVSFQAIGKNPFWVYDGEALRLFRKFDMGHLQLGNRFCFSPNTPLWFTLNNIQPQPQLNLD

SEQ ID NO: 284587 - protein, 71 aa, Glycine max
  Clone ID: PAT_MRT3847_99007C.1.pep
FPSPHVGQQKSPSKSFCWLFTRAGPSYCRFLPGSFPCAVLSAEGDYFKCFGSLLSAGSPFIKTHPFENGIP

SEQ ID NO: 284588 - protein, 369 aa, Glycine max
  unsure (1)..(369): unsure at all Xaa locations
  Clone ID: PAT_MRT3847_99008C.1.pep
MAGSISLLEFSLVIFIQIMTHCHSSITTCLPEKHAALFILGDSLFDNGNNNYINTTTSYQANYPPYGETFFKYPSGRFSDGRMIPDAVAELAKLPILPPYLHPGHVEYVYGVNFASGGAGALRETSQGMVRPPSTLVSYCVSVXNLFCLCFGLAGAEELLSXSVYLFFSGAYDYGSLLDPNSTSVLLPVDHQGFVDIVIGNLTDAIKEIYNVGGKKFGFLNVPPIGCSPAVRILVNNGSTCFEEFSAIARLHNNALSKRLHELEKQLKGFKYSVMDFYSAFSQVFNNPTKYGFKVASVACCGSGPFRGVDSCGGNKGIKEYELCDNVNEHLFFDSHHLTDRASEYFAELIWNANRTVTSPYNLKQLFEL

SEQ ID NO: 284589 - protein, 84 aa, Glycine max
  Clone ID: PAT_MRT3847_99009C.1.pep
PRSQFVPPSFGNLQQWNTNFSRWGKRDSTQGGAERKKILRPSKKGQIKESQRNTHRGFHRDNQRVKKGAFILCYKKPNIFSFYM

SEQ ID NO: 284590 - protein, 159 aa, Glycine max
  unsure (1)..(159): unsure at all Xaa locations
  Clone ID: PAT_MRT3847_9900C.1.pep
GPGQKQGVRKNPENPPPPYTKRSPPLEKPPKTGKNPKXNPPPPKKPKKGLNPRGAKKFEKTPFPGPXVPRAKPHPGGFKKKGGPPKPGAGLGTXQQNAKKRPPPPGKKQPPPLQIPQPKTQXEPPGKGAGPLFRKKAPGKKNANPPGVFPPRQNNFFSH

SEQ ID NO: 284591 - protein, 574 aa, Glycine max
  unsure (1)..(574): unsure at all Xaa locations
  Clone ID: PAT_MRT3847_99010C.1.pep
ILGESKIKFTDSESKLQDLLVHVLDTLQPAKFHWQWVVLRLLXNEQALVERLENRDVSLVDAIKLSSPSTEKASAASENENNFIQILLTRLLVRPDAAPLFSELIHLFGRSLEDSMLLQGKWFLAGQDVLFGRKTIRQRLHNIAMKKNLSVKTQFWEPWGWCSPSTDPLTIKGDNKKFDSTSLEEGEVVEEGMDLKRCQQQVTERALIELLLPCINQSSDESRNYFASYMMKQLNYIEQQITAVTGGSKSVGSAPPGVEGQPNKVNNRKNMRGGGPALARRQTVAADSSPPSPAALRASMSLRLQLLLRFLPILCTDREPSVRSMRQFLATVIFRLLGSRVVHEDADISVNAVPFLSIREAESSSEVASAAFVDSSSGSLFDRLLLVLHGLLSSYPPSWLRAKPVSKTISEPTREISGIDRELLETLQNDLDRMQLPDTIRWHIQAAMPILIPSMRCSLSCQPPSISNSALVCLQPSITNPGSNSSSSTIPQRNPVLSRVASNASGKSKQQDNDLEIDPWTLLEDGTGSYSSAGNTASIGSGDHANIRATSWLKGAVRVRRTDLTYVGAVDDDG

SEQ ID NO: 284592 - protein, 76 aa, Glycine max
  Clone ID: PAT_MRT3847_99011C.1.pep
LLSGTEENITFNTRTEPQYKRFYSALHLCMYIELAADDPAGTATAIYSSSTDSEHDGLNLEGQGNRTGQPYIKQTT

SEQ ID NO: 284593 - protein, 62 aa, Glycine max
  Clone ID: PAT_MRT3847_99012C.1.pep
HLRPLIVNEMTPYIPVNKLLYFSLHQHSLNVSKIREHCIYGRNFKFKIIKSQKNHEKNIQTN

SEQ ID NO: 284594 - protein, 132 aa, Glycine max
  unsure (1)..(132): unsure at all Xaa locations
  Clone ID: PAT_MRT3847_99013C.1.pep
CPREXRRLTRRVGLPKENHLATGHVHVACAAVGLTMCYTPTPTSESALQQDRGSISGTSLEGYLTLLIPLTSPERKTRRREHFPLTENTHPRAAKGTPAKAQLIGADLNVPHWAGHTLKKFSLPRTAINTPP

SEQ ID NO: 284595 - protein, 249 aa, Glycine max
  unsure (1)..(249): unsure at all Xaa locations
  Clone ID: PAT_MRT3847_99014C.1.pep
MGFSLLPKATPCILFLALLSCTCFTSTDAYDPLDPNGNITIKWDIISWTPDGYVAVVTMNNFQQYRHIASPGWSMGWTWAKKEVIWSMMGGQTTEQGDCSKFKGGIPHCCKKDPTVVDLLPGTPYNQQIANCCKGGVLSSWVQDPTNAVSSFQVSVGRAGTTNRTVKVPKNFTLKAPGPGYTXGPAKIVAPTKFITSDKRRVTQALMTWNVTCTYSQFLAQKTPSCCVSLSSFYNDTLVPCPTCACGFQ

SEQ ID NO: 284596 - protein, 44 aa, Glycine max
  Clone ID: PAT_MRT3847_99015C.1.pep
SVFHAILYPSEAKALIFDPNNSNIAPRMAHSPTKSLRTSGRTRD

SEQ ID NO: 284597 - protein, 88 aa, Glycine max
  unsure (1)..(88): unsure at all Xaa locations
  Clone ID: PAT_MRT3847_99016C.1.pep
SLGEDTVKGLKVHGAGRTYIYITSCLFWGKMTLMGSYPXEHCGVGIKHLISGGLGGGPLVSIFLSEEELQRLLEPPKERLSKKHGGGP

SEQ ID NO: 284598 - protein, 44 aa, Glycine max
  Clone ID: PAT_MRT3847_99017C.1.pep
IIYKLVELACMVRSFLIKSILISSTNDIDLKVGLNYLTSYALVL

SEQ ID NO: 284599 - protein, 55 aa, Glycine max
  Clone ID: PAT_MRT3847_99018C.1.pep
PEVSLLQPTQKHMQRHAHDFIVYHPSHLKIEALAKQSNQINQASVTNSTSTSSSL

SEQ ID NO: 284600 - protein, 45 aa, Glycine max
  Clone ID: PAT_MRT3847_99019C.1.pep
KMKLKIDIWFTKKNHNSPLFCRHWDVYNICSSPMVYSYSSLFTLN

SEQ ID NO: 284601 - protein, 152 aa, Glycine max
  unsure (1)..(152): unsure at all Xaa locations
  Clone ID: PAT_MRT3847_9901C.1.pep
LEEGLLALGHQQFEQAGLCWSYLIANNKDSDTLPSDEDLQFYNRAGDIMDKGMLMSEEIEEQRLNGLCKSDNYKEQLEKKGLHGLFRDVPYDEADDQAAKMKLQGYLLWGTLQYERTVVEYKLGLPTWEECLEVACEKCELAGASXTDIGVM

SEQ ID NO: 284602 - protein, 55 aa, Glycine max
  unsure (1)..(55): unsure at all Xaa locations
  Clone ID: PAT_MRT3847_99020C.1.pep
FILFRVPFIKEFKAFASPGSLNLDPPKLHTQYXFFFFFFIFFFFFFFFFFXAVQT

SEQ ID NO: 284603 - protein, 47 aa, Glycine max
  unsure (1)..(47): unsure at all Xaa locations
  Clone ID: PAT_MRT3847_99021C.1.pep
LXIXVVXVKATXNXGXRRXFPISPNFPXXRXFGGRAHWDFXLXWXGN

SEQ ID NO: 284604 - protein, 51 aa, Glycine max
  Clone ID: PAT_MRT3847_99022C.1.pep
KCIGSNEAYSLEIYHFKGLKVKAKLYRRGAFINKRWSIYRKGNAIKKFREL

SEQ ID NO: 284605 - protein, 84 aa, Glycine max
  Clone ID: PAT_MRT3847_99023C.1.pep
FIVATKSIHFVPGVFSLICKVNLSPGYKYVSYFFYSSSPNPLDVRAAGSHLNASRSHSSTHIFDRYSPATIYKRLWALVPFETL

SEQ ID NO: 284606 - protein, 139 aa, Glycine max
  Clone ID: PAT_MRT3847_99024C.1.pep
QPLPTFSCHRQRLFSFHHCSETYASPLQDHGGRTVGYDQSPGRCCGSYRAGEGYASPPPATWLLFRGRRGERVALLQVMRSWRRLERGELFLIVQVPVGAVVKQLREGVRKSRSQREGGTTAPERQREREGEAGRSNGS

SEQ ID NO: 284607 - protein, 59 aa, Glycine max
  Clone ID: PAT_MRT3847_99025C.1.pep
AHLSTIDRRYILSFCTRASYRACDTTASTRSSSHERPPQHSPRVAPTSTTPRLAQRQRF

SEQ ID NO: 284608 - protein, 436 aa, Glycine max
  unsure (1)..(436): unsure at all Xaa locations
  Clone ID: PAT_MRT3847_99026C.1.pep
EEKEKVIRRIGVSEKKEMGWGRGMLEGVVVVGCLCLLGWAGLWFLNRRLYKEYEEKRVLVQIIFSVVFAFSCNLLQLVIFEIIPILSKEARVVNWKVDLFCLILLLVFLLPYYHCYLMLKNNGVRAERAALGAILFLFAFLYAFWRMGIHFPMPSPDKGFFTMPQLVSRIGVIGVTVMAVLSGFGAVNLPYSYLSLFIREIEETEIKALERQLMQSIETCVSKKKKIILCQMEMDNKQGSEEKLNARSLIKRIVGTVVRSVQEDQKEQDIKGLEAEVLAFIELSMQLRLFDIRPVNIYVXKSSRWMHLNSFYSXEVVQFFYVPVNSLLEHLMLLEQITSERVDIVIVXSTDAHCAKSFSIPICFLIGMEFVSSILLIRKSLATEYRIIITEVLGGDIQFDFYHRWFDAIFVASAFLSLLLLSAHYTSRQIDKHPID

SEQ ID NO: 284609 - protein, 229 aa, Glycine max
  unsure (1)..(229): unsure at all Xaa locations
  Clone ID: PAT_MRT3847_99027C.1.pep
QMEMDNKQGSEEKLNARSLIKRIVGTVVRSVQEDQKEQDIKGLEAEVLALEELSKQLFLEIYELRQAKEAAXAYSRTRLEHMQNLLGYACSVYCVYKMIKSLQSVVFKQDGSVDPVTRTISIFLQFFDIGINAALLSQYISLLFIGMLVVISVRGFLTNLMKFFFAVSRVGSGSSSNVVLFLSEIMGMYFVSSILLIRKSLATEYRIIITEVLGGDIQFDFYHRWFDAI

SEQ ID NO: 284610 - protein, 61 aa, Glycine max
  unsure (1)..(61): unsure at all Xaa locations
  Clone ID: PAT_MRT3847_99028C.1.pep
LEVSVSYCEXGEVRHVEGRATRLTEIQKEDSVSMLAEAGGTKDDLRVPSNESVVSQNKDAI

SEQ ID NO: 284611 - protein, 300 aa, Glycine max
  Clone ID: PAT_MRT3847_99029C.1.pep
MEILYSKLYDKYTKLKSKKLSDLDHINKEQEVKFVNYLTAAEELIEHLKSEKEGLLEQVNELRTELASLRAAKEKEVADYQKLLMEEKDKNEALSEEVEKLLKLHQERTCHDLYNNSKIMTVDDQFKANSNSSSIRMTRKRTRQNALEKEARLISFENDQANSVERESTENTCKETASGKLLECCTKANDQPGIDVHESGHGNWLIQVLFEYALGMKLSTDYQTGRICLSALHQSSGYSFSLSWIGKSPGEEEAELLYHVISLGTFERVAPEWMKEDIMFSPSMCPIFFERISRVIKLNH

SEQ ID NO: 284612 - protein, 136 aa, Glycine max
  unsure (1)..(136): unsure at all Xaa locations
  Clone ID: PAT_MRT3847_9902C.1.pep
HFLPRIFLPLPRGHTRWWRSEIPTFLPIRERRVAGSFFAGFLFIMCGSRRAPPFLPRTGRCVFAWRNTNLIRGVSFICASVCVAALQYCVNRNTAXSELRISPRQMRRLPLPYRVSAENISGVSXTENVFRRGRPS

SEQ ID NO: 284613 - protein, 93 aa, Glycine max
  Clone ID: PAT_MRT3847_99030C.1.pep
TTDNPKLPIANNYSSVLMVPIPCAKTILIQFILYLTMQKQIYIQHIVQQYFCSENQQKQMGILKDFAQCASVDINYNNINPLTGDLLRLERLE

SEQ ID NO: 284614 - protein, 21 aa, Glycine max
  Clone ID: PAT_MRT3847_99031C.1.pep
LNCYVNKQILHIVYQMCLFTY

SEQ ID NO: 284615 - protein, 53 aa, Glycine max
  Clone ID: PAT_MRT3847_99032C.1.pep
AIASMCVQPEVTQRPFMGEVVQALKLVCSELEETSYVRPKSFRVPGGRVGFSE

SEQ ID NO: 284616 - protein, 34 aa, Glycine max
  unsure (1)..(34): unsure at all Xaa locations
  Clone ID: PAT_MRT3847_99033C.1.pep
FIISYISLIIPFLHHLITPHRXMISANSTIELYL

SEQ ID NO: 284617 - protein, 138 aa, Glycine max
  Clone ID: PAT_MRT3847_99034C.1.pep
GYLAPFRRNIYHLRDFCEGCGRPHGKEELFNYRQSSLRNVIERCVGVLKARFPILKLMPSYPIRRQRLILIACCTIHNFIRMQNGVDTLFDQYAEQLVDMDEQWLSVEQQGVNKNQAAKVAQVRQTITNEMWEDYRKS

SEQ ID NO: 284618 - protein, 74 aa, Glycine max
  Clone ID: PAT_MRT3847_99035C.1.pep
FCVSLMLALTHIHPSTLSQLDHIDGSSHKAKSNLAAIGCLAIMSAALNGINGQHRLSRKKILFPAINIFTETQI

SEQ ID NO: 284619 - protein, 114 aa, Glycine max
  Clone ID: PAT_MRT3847_99036C.1.pep
MAPRYEMAVGLHKGHKTTKIRTLKTVAATVDKRNRMRPSRTKGLQTKHTKFVRDLIREVVGHAPYEKRAMELLKVSKDKRALKYLKRRLGTHIRAKRKREELSNILTQMRKHAK

SEQ ID NO: 284620 - protein, 47 aa, Glycine max
  unsure (1)..(47): unsure at all Xaa locations
  Clone ID: PAT_MRT3847_99037C.1.pep
XXSXXLXAKXVIIXDPRLSXSTHHXGARIXESGSAXXRNXTTWXSSM

SEQ ID NO: 284621 - protein, 44 aa, Glycine max
  unsure (1)..(44): unsure at all Xaa locations
  Clone ID: PAT_MRT3847_99038C.1.pep
ERDFEEDLARDRKKAFINYHXRQCILKPVFIFDDFNDGVSYTPS

SEQ ID NO: 284622 - protein, 124 aa, Glycine max
  Clone ID: PAT_MRT3847_99039C.1.pep
WGWSRLRVYGFQKSFPPPQFSVHHQIPPSPSPVLRSCISNVGKKSKKKKKRVHFAEDVVESCRDGEEFRKRNSRSKVLKSYYNNNNGEEEEEEAKIGGVMPANRVALYNGILRGRVAQRLAYSC

SEQ ID NO: 284623 - protein, 425 aa, Glycine max
  Clone ID: PAT_MRT3847_9903C.1.pep
MDSSSQMLSAEDNKISPKTFDQKIIESSQTFMKDIKPKTSSQASHTMLSEVEKISNLPRVAAKDRKSYPENASSAVEKELVKPRTKKLKMQLASTNHIGLPDASDEKLCLKPLSTQDQDMESKDDVISACDRNTPAYNGNITIASSSRLGEVKISLNCDSALGQPNFSIPNLDIVMKFMDKKYIRSCNAVEPQFSMAKLLDDLCRIYLKLGYRKGSNSKRANLQQYVNQGERNPFRFISDITKGSEKVKISLIDETGSEDLPKFNYIPCNITYQSANVNISLARISDEGCCSDCSGNCLSSPLPCACAQETGGEFAYTPHGLLKEEFLTACVSMKNEPQDHHYVYCQECPLEKSKNEYMPERCKGHMVRKFIKECWRKCGCDMQCGNRIVQRGIACKLQVFSTREGKGWGLRTLEDYPKGTLYVI

SEQ ID NO: 284624 - protein, 678 aa, Glycine max
  unsure (1)..(678): unsure at all Xaa locations
  Clone ID: PAT_MRT3847_99040C.1.pep
ETSXFARRWVPFCKXYXIEPRAPEWYFGQKMDYLKNKVHPAFVRERRAMKRDYEEFKVRINSLVATAQKVPEDGWTMQDGTPWPGNNVRDHPGMIQVFLGQDGVRDVEGNELPRLVYVSREKRPGFDHHKKAGAMNALVRASAIITNAPYLLNVDCDHYINNSKALREAMCFMMDPQLGKKVCYVQFPQRFDGIDRHDRYSNRNVVFFDINMKGLDGIQGPIYVGTGCVFRRYALYGYDAPAKKKPPSKTCNCWPKWCCLCCGSRKKKNANTKKEKKRKVKHSEASKQIHALENIEAGNEGTNNEKTSNLTQTKLEKRFGQSPVFVASTLLDDGGVPQGVSPASLLKEAIQVISCGYEDKTEWGKEVGWIYGSVTEDILTGFKMHCHGWRSVYCIPKRPAFKGSAPINLSDRLHQVLRWALGSVEIFFSRHCPIWYGYGGGLKLLERFSYINSVVYPWTSLPLLVYCTLPAICLLTGKFIVPEISNYASLVFMALFISIAATRILEMQWGGVSIDDWWRNEQFWVIGGVSSHLFALFQGLLKVLAGVNTNFTVTSKAADDGEFSELYIFKWTSLLIPPMTLLIMNIVGVVVGVSDAINNGYDSWGPLFGRLFFALWVIXHLYPFLKGLLGKQDRMPTIILVWSILLASILTLMWVRINPFVSRDGPVLEICGLNCDES

SEQ ID NO: 284625 - protein, 42 aa, Glycine max
  Clone ID: PAT_MRT3847_99041C.1.pep
QKISRACFPHAQQYAPLYPSRSLHSITMLSDIQMIILPGSLG

SEQ ID NO: 284626 - protein, 66 aa, Glycine max
  unsure (1)..(66): unsure at all Xaa locations
  Clone ID: PAT_MRT3847_99042C.1.pep
IFKLWASDGIMFQXVPLVLITNYLHNKFRYSMVGNMIFWFIFSILGQHMCVLLYYHDLMNRKGKLD

SEQ ID NO: 284627 - protein, 66 aa, Glycine max
  Clone ID: PAT_MRT3847_99043C.1.pep
FTLGVTFNPFQSYAHLKPPLSFLSSITNIIIFDNTLCSDNVLIINKHVWHYYFSPHIKSCPSSTIL

SEQ ID NO: 284628 - protein, 44 aa, Glycine max
  Clone ID: PAT_MRT3847_99044C.1.pep
FNFHALGVKIFTLGPFKYLVQKSTIVVSVKNFYTISAFKLNSST

SEQ ID NO: 284629 - protein, 59 aa, Glycine max
  Clone ID: PAT_MRT3847_99045C.1.pep
LTGLIAQPPKVHRVACSATDPEACLAQHGVAMYPLRPRRRSNLGTEIASTCLPTQQRGH

SEQ ID NO: 284630 - protein, 93 aa, Glycine max
  unsure (1)..(93): unsure at all Xaa locations
  Clone ID: PAT_MRT3847_99046C.1.pep
MYMCLCPYYAPVRPGTXMIYSLSPPQTSLVNLFMICSRGARYADXVSHRYVNLSRLVLSGSTXYNSKMGNIGTSGSCFADEVSTIYPLMMALC

SEQ ID NO: 284631 - protein, 70 aa, Glycine max
  Clone ID: PAT_MRT3847_99047C.1.pep
FVIIFFLFFFMDYFVIFIMKDMFMLNKKKKKYFEKNVYKDRNNVLEIKKKNLRIKGAISCGCESMEIGVN

SEQ ID NO: 284632 - protein, 116 aa, Glycine max
  Clone ID: PAT_MRT3847_99048C.1.pep
KKKKKGGNWKKKTIFLMSPIHLKTLLTIRDLCSFRVWGAPPFCCLVSFFCFLDPPPRGTTSFSFYGSGSSPDQVRHRVFPTENIFRFGSRQRSWGGSSFLLLSGLWVDSLLSSFWG

SEQ ID NO: 284633 - protein, 350 aa, Glycine max
  unsure (1)..(350): unsure at all Xaa locations
  Clone ID: PAT_MRT3847_99049C.1.pep
MAENFDDLNNKLPELKLDSKQAQGFLSFFKTLPDDPRAVRFFDRRDYYIAHGENATFIAKTYYHTTTAMRQLGSGSNALSSVSVSRNMFETIARDLLLERTDHTLELYEGSGSNWRLVKSGTPGNIGSFEDVLFANSEMQDSPVVVALSLNYRENGCTIGLGFVDLTKRVLGMAEFLDDSHFTNVESAFVALGRKQCILPIESGESTDNRMLCDXLTKCGVMLTEREKSEFRTRDLVQDLGRLVKGPIEPVRDLVSGFGSAPGALGALLSYAELLADESNYENYTLRSYNLDSYMRLDSAAMRALNVLXSKTDANKNFSLFGLMNRTCTAGMGKRXLHVWLKQPLVDVKE

SEQ ID NO: 284634 - protein, 72 aa, Glycine max
  Clone ID: PAT_MRT3847_9904C.1.pep
THESAVKDVVSKLTPLLTKNKLLVSVAAGTKLKDLQEWAGNDRFIRVMPNTPAAVGQAASGIIYNFFFFFTF

SEQ ID NO: 284635 - protein, 67 aa, Glycine max
  Clone ID: PAT_MRT3847_99050C.1.pep
GIFTVATRALTVPIFLSYELSVVFQLLKISASVWNGGSFLIDVMPRQVILKEKKKSEMQLVQNQKDQ

SEQ ID NO: 284636 - protein, 39 aa, Glycine max
  Clone ID: PAT_MRT3847_99051C.1.pep
TYIKSHLMVRRLCGKSRHHKRIPLCLKIKTVYKSFLASQ

SEQ ID NO: 284637 - protein, 157 aa, Glycine max
  unsure (1)..(157): unsure at all Xaa locations
  Clone ID: PAT_MRT3847_99052C.1.pep
MNFNSPPLRSSSGSVSNSLASPNHHFMSPTASTKGQIVWCCDGDPAAMDIVSASKQLWIGYVGPDVPENPIRFHLERFGTIEQFIFFPVKGFALVEYRRIIDAIKTRHCLPGCFPCRVKFMDIGLGTRGAMNGVAVGSSSHIYXGNIPSQWARDEIL

SEQ ID NO: 284638 - protein, 55 aa, Glycine max
  Clone ID: PAT_MRT3847_99053C.1.pep
DWGGLKGGSPRGPVAANGRPSGYGNPGTCKWGVGRASFKQGGALIRDNDNLLMWS

SEQ ID NO: 284639 - protein, 39 aa, Glycine max
  unsure (1)..(39): unsure at all Xaa locations
  Clone ID: PAT_MRT3847_99054C.1.pep
RSGPAHILCFALPFNIXLLASPSLPLFVVIQSKYIMYSY

SEQ ID NO: 284640 - protein, 294 aa, Glycine max
  Clone ID: PAT_MRT3847_99055C.1.pep
DIHATLHYGCEKTTEGVKEGIYEENVEIPSYKTNIMMLGDGSDVSFITGNRSVGDGWTTFRSATLAVSGDGFLARDIAIENSAGPEKHQAVALRVNADLAAFYRCAIYGYQDTLYVHSFRQFYRECDIYGTIDYIFGNAAAILQECNIISRKPMPGQFTVITAQSRDSPDEDTGISFQNCSIIATLDLYSNSSSFKSYLGRPWRIYSRTVYLESYIDDFIDPKGWTKWSNEQGLETLYYGEYDNYGPGSSIDKRVQWLGYHLMDYGDAYNFTVSEFINGDGWLDTTSVPYDDGI

SEQ ID NO: 284641 - protein, 229 aa, Glycine max
  unsure (1)..(229): unsure at all Xaa locations
  Clone ID: PAT_MRT3847_99056C.1.pep
AEDVIEDIKAWGFSPNIVTYNTLIDGHCKKGSAGKMYRADAILKEMLANKICPNEITFNTLIDGFCKDENVLAAKNAFEEMQRQGLKPNIVTYNSLINGLSNNGKLHEAIALWDKMVGLGLKPNIVTFNALINGFCKKKMIKEARKLFDDIAEQDLVPNAITFNTMIDAFCKAGMMEEGFALPNSXLDEGIFPNVSTYNCLIAGVCRIHNVRTGKNLLIEWDTLNWKPV

SEQ ID NO: 284642 - protein, 77 aa, Glycine max
  Clone ID: PAT_MRT3847_99057C.1.pep
NHLLLVKSLLDSGQFSSSGWRFGVCTLRRWPCCSCKNILNAYPSIAWGFGVTTLRRWPCCVGKKILNALLSGTHCIR

SEQ ID NO: 284643 - protein, 196 aa, Glycine max
  Clone ID: PAT_MRT3847_99058C.1.pep
RWFVKQGRLEEASRSLQRIRGQPADSSYVQEELAEIVANHEYEMELSPQGGYFSSWAACFSGSLWNPGSNLRRTILGTSLQMMQQWTGVNFIFYFGTTFFKDLGTISNPFLISLITTLVNVCSTPLSFWTIETLGRRPLLIWGALGMLICEFITVIIGTARPNDEAVTKAQISFICIYIFFFDSTCGPRAWVCIGE

SEQ ID NO: 284644 - protein, 77 aa, Glycine max
  Clone ID: PAT_MRT3847_99059C.1.pep
GFNVFFFEKKTRRATPTRRIHKPNYLIQGFNKGKDSGVFCHAGVLLYMGGGRPKEEALGEIISKCRLLWNGIQRSVM

SEQ ID NO: 284645 - protein, 52 aa, Glycine max
  unsure (1)..(52): unsure at all Xaa locations
  Clone ID: PAT_MRT3847_9905C.1.pep
NIKNSQLTLNLILTYXHKYNLTAVIHKANGLNDTSLIVMRCWYKIFTLXPTN

SEQ ID NO: 284646 - protein, 84 aa, Glycine max
  Clone ID: PAT_MRT3847_99060C.1.pep
FIHPFIHYHLDNTTLNNLHYSLHLLNPQSIQILQPCHFLLHLLSPNLYYFPILQLLPLSSHPFVPSTTTFNYSLSSTSFFNPTT

SEQ ID NO: 284647 - protein, 84 aa, Glycine max
  Clone ID: PAT_MRT3847_99061C.1.pep
MALATEAFFLTQAFSGLKAGDRASGPGRQNSSFSFSSPKPLRFSRTIKAAAAARTTKAPAKVGAAPVGFTPPELDPNTLSRIFG

SEQ ID NO: 284648 - protein, 84 aa, Glycine max
  unsure (1)..(84): unsure at all Xaa locations
  Clone ID: PAT_MRT3847_99062C.1.pep
XGVXCVREXLRVRIGDARXDHLLCILXLRXXRXXMDASIWTNWXSHXVISIXCTEXLVXMXXNAXQIVVDLRXXXSXGVXXXXS

SEQ ID NO: 284649 - protein, 492 aa, Glycine max
  Clone ID: PAT_MRT3847_99063C.1.pep
MEKQLISILWSFPHWHIHKSEKFKDFNPSWISFGRYHHHTKQKKVSTAPNDSSDSPSVPSDPSASPPSNSPSPSNSPSVPSDPYPNDNQTSSSDCVFDVRSFGAVGDGCADDTRAFRAAWKAACAVDSGIVLAPENYSFKITSTIFSGPCKPGLVFQVDGTLMAPDGPNSWPEADSRNQWLVFYRLDQMTLNGTGTIEGNGDKWWDLPCKPHRGPNGKTLSGPCGSPAMIRFFMSSNLKVKGLKIQNSPQFHMIFNGCQGVLIDKLSISSPKLSPNTDGIHVENSKYVGIYNSMISNGDDCISIGPGSSNVDIAGLTCGPSHGISIGSLGVHNSQACVSNLTVRDSIIRESDNGLRIKTWQGGMGSVSSLRFENIQMENVGNCIIIDQYYCLSKECLNQTSAVHVNDVSYSNIKGTYDVRTAPIHFACSDTVACTNITLSEVELLPFEGALLDDPFCWNAYGTQETLTIPPINCLREGDPETVGDLSEYQCS

SEQ ID NO: 284650 - protein, 300 aa, Glycine max
  Clone ID: PAT_MRT3847_99064C.1.pep
MCGGAIIADFIPRRGGRRLTASELWPNSFAKDDDFDLDYSHIATQQPSTLKRSQPPKVSEQVENKPVKRQRKNLYRGIRQRPWGKWAAEIRDPRKGVRVWLGTFNTAEEAARAYDREARKIRGKKAKVNFPNEDDEYSIQARNPIPPLPFAPQHPPLYQQQYRCDLNNAPKNLNFEFGYDLNHAEAFPSRVDAVNADSVVVSVDENSGSASGSEGAYSTTEFMGSVQNGNGYLGGTVMEKKEKETEVIEAEEEKNKVLELSEELMAYENYMKFYQIPYYDGQSTTNNVQESLVGDLWSFD

SEQ ID NO: 284651 - protein, 144 aa, Glycine max
  Clone ID: PAT_MRT3847_99065C.1.pep
YLDYPHQACLLTPLVQRYINFSGTPPLLVTSPYHCPFSTSEFKLISLPILPRSLLWARGVLYSPFLSPIPFTTDYLGCSFIGRDVLYTASLSSYLSSPPLPFWAIFYSSPPPPPPPPPPPPPPPKEGGRHTVMTGNLPWNGIGS

SEQ ID NO: 284652 - protein, 60 aa, Glycine max
  Clone ID: PAT_MRT3847_99066C.1.pep
FLCLNLYSQISHFLIFGVKIKIHFSLVLLFSFSWSINFKIVIFNILKYSFYINNKLVFPF

SEQ ID NO: 284653 - protein, 39 aa, Glycine max
  Clone ID: PAT_MRT3847_99067C.1.pep
IYPVKLLFNIPPKQKITIQQNQMVSLVSAMLSSGFVELY

SEQ ID NO: 284654 - protein, 48 aa, Glycine max
  Clone ID: PAT_MRT3847_99068C.1.pep
YQFPIRATRHTYAYQHHNIYYKLNKLIRPIRYGESKLQYPSLQLIRYL

SEQ ID NO: 284655 - protein, 93 aa, Glycine max
  Clone ID: PAT_MRT3847_99069C.1.pep
ITSAMERKGRPANMRRIVPKAIRLQFVSLDMANAMEAAPISEKHGAQTRSPNEYPYKGWAVGVYFRIHRRDFRSPHACIFIFPFCFTSCLILT

SEQ ID NO: 284656 - protein, 400 aa, Glycine max
  Clone ID: PAT_MRT3847_9906C.1.pep
MSFRSIILERKGFEVKFGYSMRSRSQSHSDAIAQDSLVVLDGLKQSCWANMPPELLRDVLMRIEASEDSWPAQKHVVACAGVCRSWREIMKEIVKSPQLSGKLTFPISLKQPGPRDSLLQCYIKRNRSNQTYYLFLGLNQASTDEGKFLLSARKCRRATHTDYIISLNCDDVSRGSSTYIGKLRSNFLGTKFTVYDAHPPIYGAKVTKSRSTRLVSLKQVSPRVPAGNYPIAHVSYDLNVLGSRGPRIMQCVMDAIPASAVEPGGVAPTQTQFLHSRIDTSPSIPFFRSKSTRMDNLPTVPLTCQNEGTLVLRNKSPRWHEHLQCWCLNFNGRVTVASVKNFQLVASPKNGVSEQAQENVILQFGKVGKDVFTMDYQYPISAFQAFAICLSSFDTKIACE

SEQ ID NO: 284657 - protein, 94 aa, Glycine max
  unsure (1)..(94): unsure at all Xaa locations
  Clone ID: PAT_MRT3847_99070C.1.pep
SGCLDRAKGGNHKQNGGSHEAGSKGRPGKATRTPXGEPXXQAQXTDXDFDLLPREGDRQKGVAHSGELKSGGYAPPATKTNMVEATHERYRYEP

SEQ ID NO: 284658 - protein, 49 aa, Glycine max
  Clone ID: PAT_MRT3847_99071C.1.pep
DSGIFTLLTHVFPSYFDLYKITYIITTLCTKTPNPLTPSAPLTRTNHGL

SEQ ID NO: 284659 - protein, 158 aa, Glycine max
  Clone ID: PAT_MRT3847_99072C.1.pep
LNTGISGSRLWGTIPQSISQLTVWNQMATVRTPLNFESSKQSCCQLSIDLIGGGILVDKTGDCITLIQKSAMSNLWRVAAGKKGWLSGKIVMCGNAPVKRSDCASLRHVLLTNSNSSEHFDACKWTKSQPHSWELIFPIEVCGPNNGSEMWRSERANQ

SEQ ID NO: 284660 - protein, 68 aa, Glycine max
  unsure (1)..(68): unsure at all Xaa locations
  Clone ID: PAT_MRT3847_99073C.1.pep
GPLTILSVISLAASNVIGLDFSVWVIFHFTCRLMEDGRSIIVSVLLDXVVSSNCFFFLSSINFYSRKA

SEQ ID NO: 284661 - protein, 229 aa, Glycine max
  Clone ID: PAT_MRT3847_99074C.1.pep
RASLSRVLVDYYPLAGRLIRSSICDCEDDHKLEVDCKGEGAVFAEAFMDATAEELLESCKVPNDSWRKLLYKVEAQSFLDVPPLVIQVTNLRCGGMILCTAINHSLCDGIGSSQFLHAWAHLTREPNTELTILPFHGRHVLKPRNTSQVHFTHPQYTRTHPSSHVDLHKLMMQSQSLVATSFTFGPSEVHFLKKQCVLSLKCITTFETVAAHTWRAWVKSLNLCPMQTV

SEQ ID NO: 284662 - protein, 41 aa, Glycine max
  Clone ID: PAT_MRT3847_99075C.1.pep
GICTHSTCEQFRDPKALIVKVLQLNGSCTYKITLSFYLISP

SEQ ID NO: 284663 - protein, 80 aa, Glycine max
  unsure (1)..(80): unsure at all Xaa locations
  Clone ID: PAT_MRT3847_99076C.1.pep
WKVAAPSGFVLSPVSSGWLAFCIAXVISVVPLMWVRSKVLFLHSGGLLGLYAXVDLLASFVGSWQRMDVNXSVPRQDGIG

SEQ ID NO: 284664 - protein, 55 aa, Glycine max
  Clone ID: PAT_MRT3847_99077C.1.pep
RADRNSPKIIEALSVDGSSGPHIESSNTDLLSGKSGASLSERYAVVPDETVSVSF

SEQ ID NO: 284665 - protein, 46 aa, Glycine max
  Clone ID: PAT_MRT3847_99078C.1.pep
VSVADWNQVNDEYALVYANPKKGSEKVLVKCLAMNDKLIAYAYSHR

SEQ ID NO: 284666 - protein, 590 aa, Glycine max
  Clone ID: PAT_MRT3847_99079C.1.pep
MTEERNVRKTRVVDVVLDCVIPYIDDPKDRDAVSQVCRRWYELDSLTRKHVTIALCYTTTPARLRRRFPHLESLKLKGKPRAAMFNLIPEDWGGHVTPWVKEISQYFDCLKSLHFRRMIVKDSDLQNLARDRGHVLHALKLDKCSGFTTDGLFHIGRFCKSLRVLFLEESSILEKDGEWLHELALNNTVLETLNFYLTDIAVVKIQDLELLAKNCPNLVSVKLTDCEVLDLVNFFKHASALEEFCGGTYNEEPEKYSAISLPAKLCRLGLTYIGKNELPIVFMFAAVLKKLDLLYAMLDTEDHCMLIQRCPNLEVLETRNVIGDRGLEVLGRCCKRLKRLRIERGDDDQGMEDEEGTVSHRGLIALSQGCSELEYMAVYVSDITNASLEHIGTHLKNLCDFRLVLLDHEEKITDLPLDNGVRALLRGCDKLRRFALYLRRGGLTDVGLGYIGQYSPNVRWMLLGYVGESDAGLLEFAKGCPSLQKLEMRGCLFFSERALAVAATQLTSLRYLWVQGYGVSPSGRDLLVMARPFWNIELIPSRKVATNTNPDETVVVEHPAHILAYYSLAGQRSDFPDTVVPLDTATCVDT

SEQ ID NO: 284667 - protein, 150 aa, Glycine max
  unsure (1)..(150): unsure at all Xaa locations
  Clone ID: PAT_MRT3847_9907C.1.pep
MGGILKQPGAFAITPHKVSLCILLKIYAPPAQISVPFPFASVAQHNRLGLFLLALTKSCDDIMEPKLDELIHQLRMMSQNWEASWVIDHLMSSLSSLSSPDDLFNXFSDIRGILGGPDSGAVEDDQVILDMNSXPGIFLSRXVLAFTCYR

SEQ ID NO: 284668 - protein, 122 aa, Glycine max
  unsure (1)..(122): unsure at all Xaa locations
  Clone ID: PAT_MRT3847_99080C.1.pep
XCXXPLXXXVXVXXXYRXXDPXXXXTLXXXVXTXLXXXSCXXXXNXXPWXXXXXQHXLXSSSXSSXXVXTXXVYLXXXXPXLTXTXRXVXXPYXCSHXPAHXPXFXNXSXXXXXXXVXSHXX

SEQ ID NO: 284669 - protein, 44 aa, Glycine max
  Clone ID: PAT_MRT3847_99081C.1.pep
AARTTGEELKSCVFHHVCNACWTALSQPCLSCHRHYCSRFYHLP

SEQ ID NO: 284670 - protein, 99 aa, Glycine max
  Clone ID: PAT_MRT3847_99082C.1.pep
SIYRRNFQLIESCLFITLKMRHFFFFLFCLLHPLISHKCTCNKYLPSKNVLCLESMTPLAPFSIFLREFNLDKILYIPLAYGDSGSMVCLSNRISTPIP

SEQ ID NO: 284671 - protein, 75 aa, Glycine max
  Clone ID: PAT_MRT3847_99083C.1.pep
ARWLSRPGPVLAGLHRARAGPGRPGPFGHLYSIYMYSPCPCPHLYQYKPSLVKWMCIIVALSKKKKKKTIKKKKK

SEQ ID NO: 284672 - protein, 65 aa, Glycine max
  Clone ID: PAT_MRT3847_99084C.1.pep
KGDTGLSEELRVKGSVRTERTVSYQAGSNVEEKVRGGGIRVRIHITWRSSLHRIYSPRAEFEKRR

SEQ ID NO: 284673 - protein, 278 aa, Glycine max
  Clone ID: PAT_MRT3847_99085C.1.pep
MLPLEHHFRYHPPLTLTKLKPFSRANSRVSLPHIDNSFHRFNPNPCRFRCPISSNDSLRFGLRVGHRASWVCRSTGEPDSAADSGEKKTGSSSSDEDADSNRRKGGWWSRWRRWRWQPLIQAQEIGVLLMQIGIAFFVMRLLRPGIPLPGSDPRSSTVFVSVPYSEFLSRINSDQVHKVEVDGVHIMFKLKAGVGTSNDDGGDVVASSTSSTTRLQESESLAKSVAPTRRIVYTTTRPSDIRTPYEKMLDNKVEFGSPDKRSGGFFNSALIALFMLLC

SEQ ID NO: 284674 - protein, 60 aa, Glycine max
  Clone ID: PAT_MRT3847_99086C.1.pep
VNFGANALVTFAFSPLKALLGAGILFYTFGVIAVTSLVFIYLVIPETKGLTLEEIEAKCL

SEQ ID NO: 284675 - protein, 56 aa, Glycine max
  Clone ID: PAT_MRT3847_99087C.1.pep
DITQKSVPIYNPAPLRSTTCSADCLWTLEATRVLPYYSSMSTKITLCWAGGRSSLT

SEQ ID NO: 284676 - protein, 69 aa, Glycine max
  Clone ID: PAT_MRT3847_99088C.1.pep
DRTCIKSRRFTSAKEAIYMYEKMREAKIIITEVAMVGAISACAQLRDIRISNTLTDHLEQGCCGKSFCY

SEQ ID NO: 284677 - protein, 328 aa, Glycine max
  Clone ID: PAT_MRT3847_99089C.1.pep
MLSSHSPPPPPPSFSTTTSTTTTTFTSSPCPRRIYLNNPTQIPKPYPYTHLFTHHSSLLNNYFTNMNPSCRFSSTKHTPFLHNSKPTSPFFLRHSHSHSHQVKPFPLSPPITTTTAKPYPLNILRLRNIKLSHPLATLSSFAEGEEENQKEGAESPPNNDELGGIAKAFNISSRTASAISICMALAVLTFPLFMTSLGQGMALKTKVLSYATLLFGFYMAWNIGANDVANAMGTSVGSGALTLRQAVLTAAVLEFSGALMMGTHVTSTMQKGILVANVFNGKDSLLFAGLLSSLAAAGTWLQFASYYGWPVSTTHCIVGAMVGFGLAY

SEQ ID NO: 284678 - protein, 86 aa, Glycine max
  Clone ID: PAT_MRT3847_9908C.1.pep
RRPPLIFWGVLFKLCGPNPPLCSGYESLGVEQKSPCPPKQDSKPQPQQQKRKRHKKTKKEVPNGPGIRGKETRPKDGKKNRKGPGN

SEQ ID NO: 284679 - protein, 93 aa, Glycine max
  unsure (1)..(93): unsure at all Xaa locations
  Clone ID: PAT_MRT3847_99090C.1.pep
PSEVACLCPCLQLAFQSFFFYLILSHKWTXRRSFXGGLHEMSFVCKVLLRQLPCRLPPKVLIVVMTHKKLDIKSCIYFVSGRLKGVGFFFFSF

SEQ ID NO: 284680 - protein, 142 aa, Glycine max
  Clone ID: PAT_MRT3847_99091C.1.pep
MAPLPAEQTGESAPTELQRSIPTPFLTKTYQLVDDPSADDLISWNEDGTSFIVWRPAEFARDLLPKYFKHNNFSSFVRQLNTYGFRKVVPDRWEFANDCFRRGERALLRDIQRRKLLPVPRRARRGTRRKQRFRSCLGFRLD

SEQ ID NO: 284681 - protein, 179 aa, Glycine max
  Clone ID: PAT_MRT3847_99092C.1.pep
IKGFRKVVPDRWEFANDCFRRGERALLRDIQRRKLLPVPPAAAAPAAVTANTVTVAVAAPAVRTVSPTTSGDEQVLSSNSSPIAGNNNNNTVHRTTSCTTAPELLEENERLRKENIQLSNELSQLKGLCNNILSLMTNYASGFSRQQLESSTSAVRTVPGPDGKAPVELLPAKHVSSAD

SEQ ID NO: 284682 - protein, 218 aa, Glycine max
  unsure (1)..(218): unsure at all Xaa locations
  Clone ID: PAT_MRT3847_99093C.1.pep
EPQDLCLNLHLCFLPSADELHLAPVANVVPPKETPNSVPISYHSSHSHPPLNERIISSMTRRSVAAHPWHDLEIGPGAPTIFNCVIEIGKGSKVKYELDKKSGLIKIDRVLYSSVVYPHNYGFIPRTICEDSDPLDVLIIMQEPVLPGCFLRAKAIGLMPMIDQGEKDDKIIXAVCADDPXEYRHYNDIKELPPHRLADIRRFFGDYQKNETKKVVDE

SEQ ID NO: 284683 - protein, 358 aa, Glycine max
  unsure (1)..(358): unsure at all Xaa locations
  Clone ID: PAT_MRT3847_99094C.1.pep
MAPLPAEQTGESAPTELQRSIPTPFLTKTYQLVDDPSADDLISWNEDGTSFIVWRPAEFARDLLPKYFKHNNFSSFVRHLNTYGFRKVVPDRWEFANDCFRRGERALLRDIQRRKLLPVPPAAAAPAAVTANTVTVAVAAPAVRTVSPTTSGDEQVLSSNSSPIAGNNNNNTVHRTTSCTTAPELLEENERLRKENIQLSNELSQLKGLCNNILSLMTNYASGFSRQQLESSTSAVRTVPVPDGKAPLELLPAKXSHVSSADEAGHVGGAAPCATANAGEAEVPKLFGVSIGLKRCRTECEGEAEGEDQNQMQTRAQAQTQTQSSQEPDHGSDVKSEPLDGDDSDDQDHDPRWLELGK

SEQ ID NO: 284684 - protein, 66 aa, Glycine max
  Clone ID: PAT_MRT3847_99095C.1.pep
MVETEMDAETVANVVPPKETPNSVSISHHSSHPPLNERIISSMTRRSVAAHPWHDLEIGPGAPIIF

SEQ ID NO: 284685 - protein, 83 aa, Glycine max
  Clone ID: PAT_MRT3847_99096C.1.pep
MKPLPAEQTGESAPTELQRSIPTPFLTKTYQLVDDPSADDLISWNEDGTSFIVWRPAEFARDLLPKYFKHNNYSSFVRQLNTY

SEQ ID NO: 284686 - protein, 82 aa, Glycine max
  Clone ID: PAT_MRT3847_99097C.1.pep
ARVTVVINLVIWDKHSTWVGTVGLLICMLGGIMYQQSTSKPKAAKQVSAQENEEEEQKLLEMQVNSETNINNNEVNKPREES

SEQ ID NO: 284687 - protein, 67 aa, Glycine max
  unsure (1)..(67): unsure at all Xaa locations
  Clone ID: PAT_MRT3847_99098C.1.pep
DSRKXLKWDNLKSFLFISNVPLKIKNKNNFGMGCFFISLYLTQNYPFQNPYNTLLRSVRLWKGSQAR

SEQ ID NO: 284688 - protein, 57 aa, Glycine max
  unsure (1)..(57): unsure at all Xaa locations
  Clone ID: PAT_MRT3847_99099C.1.pep
MHMAYSTIALSAVTTVNRAVAXMVDSFTGLKFMAGYLTRKTTNDITYIASNGGRVQC

SEQ ID NO: 284689 - protein, 74 aa, Glycine max
  Clone ID: PAT_MRT3847_9909C.1.pep
LQVGTISVVLHGIWHEFHCQELPLITISTYHTTRLRIPSTGILVMVTHETCMKCTIIMLMVVSCFGSAGFQHIA

SEQ ID NO: 284690 - protein, 165 aa, Glycine max
  Clone ID: PAT_MRT3847_990C.1.pep
TAARRRQKGKFFLVSLLALLITAYGVAGSIMCDNIGMLEELKSLEALDIEEEENEVELSDIPSWRSERGGKVLVNIDSFGAAGDGESDDTEALQKAWGVACSTPKSVLLIPQGRRYLVNATRFKGPCADKLIIQIDGTLVAPDEPKNWDPKLPRVWLDFSKLNKT

SEQ ID NO: 284691 - protein, 229 aa, Glycine max
  Clone ID: PAT_MRT3847_99100C.1.pep
MVETEMDAETVANVVPPKETPNSVSISHHSSHPPLNERIISSMTRRSVAAHPWHDLEIGPGAPIIFNCVIEIGKGSKVKYELDKKSGLIKIDRVLYSSVVYPHNYGFIPRTICEDSDPLDVLIIMQEPVLPGCFLRAKAIGLMPMIDQGEKDDKIIAVCADDPEYRHYNDIKELPPHRLAEIRRFFEDYKKNENKEVAVNDFLPASAAFEAVKRSMSLYADYIVESLRR

SEQ ID NO: 284692 - protein, 232 aa, Glycine max
  Clone ID: PAT_MRT3847_99101C.1.pep
MVETDMDAETVANVVPPKETPNSVPISYHSSHSHPPLNERIISSMTRRSVAAHPWHDLEIGPGAPTIFNCVIEIGKGSKVKYELDKKSGLIKIDRVLYSSVVYPHNYGFIPRTICEDSDPLDVLIIMQEPVLPGCFLRAKAIGLMPMIDQGEKDDKIIAVCADDPEYRHYNDIKELPPHRLAEIRRFFEDYKKNENKEVAVNDFLPASAAFEAVNFVVFLYADYIVERLRSQ

SEQ ID NO: 284693 - protein, 98 aa, Glycine max
  Clone ID: PAT_MRT3847_99102C.1.pep
VERNHSKYNADLHQSHHRENRESETEREAWLLHAQKTSLLLSPLSLATCVPTSGLQSRGNKRGLVTYDNFTPLDRLTFLIPYWLDCFKWGVRYDAVSS

SEQ ID NO: 284694 - protein, 79 aa, Glycine max
  unsure (1)..(79): unsure at all Xaa locations
  Clone ID: PAT_MRT3847_99103C.1.pep
IPAXXXXXXGLILVXGWLXTXWXXGXTAIAVRXAVKXXLVXXEPMGKPXPFSSLEVWTWXXCXPXIICICIXYPTALGT

SEQ ID NO: 284695 - protein, 54 aa, Glycine max
  Clone ID: PAT_MRT3847_99104C.1.pep
PYGQGLGEKNHDRVSDAVGSALVAFDGILYNWTLQVHNQSEGAGEKARSCTNRA

SEQ ID NO: 284696 - protein, 160 aa, Glycine max
  unsure (1)..(160): unsure at all Xaa locations
  Clone ID: PAT_MRT3847_99105C.1.pep
PDRNSRVGPRVQKDVTMGGCKGPITTFIVEPFGPHKKNXYLNIVSKRLGCSINFFECGGMEIEENWDKVKTIFIPTRVSLTSETCAELVATLPLEIKGEIAAFIKAVYTLFQDLDFTFLEMNPFALVDGKPYPLDMTGELDDTAAVKNFKKWGSIEFPMP

SEQ ID NO: 284697 - protein, 90 aa, Glycine max
  Clone ID: PAT_MRT3847_99106C.1.pep
MVLKKRVDYGFNGFRVPVIPKAPRSARRRVAFNKAVEDGQVCAIELLASLAGQLLQESESSAFSNASEGNHQPAFSQGVIEQDIQDEVKP

SEQ ID NO: 284698 - protein, 155 aa, Glycine max
  Clone ID: PAT_MRT3847_99107C.1.pep
KKQKIHLGFIKNIDPGEITSFFKFQISPTISRFWGERQSHELWTQIYSKNAPGKRNASLKIPTLAFKKIMESFHIEIMCLAVTTELQRGNQILVIQPPTAMTAWGTNPYPETNFLMPTKTFSLSKCPSTCGGGSRFQLFLCRTVFFWYKPKEVPP

SEQ ID NO: 284699 - protein, 40 aa, Glycine max
  Clone ID: PAT_MRT3847_99108C.1.pep
GLFLNLQQIVSPNTGLKRALFAHSGREFLTKRRDILIARS

SEQ ID NO: 284700 - protein, 105 aa, Glycine max
  unsure (1)..(105): unsure at all Xaa locations
  Clone ID: PAT_MRT3847_99109C.1.pep
QVSYCGSKKKKKKKKKKKKKKKKKKKKKKKKKKKKTSGGAPAPNPPYREWITPPSLPVFXQRGNGKNPGVPNLNRFAKNPLFASWVKRKKARPDRLSKNWPTLKG

SEQ ID NO: 284701 - protein, 90 aa, Glycine max
  unsure (1)..(90): unsure at all Xaa locations
  Clone ID: PAT_MRT3847_9910C.1.pep
NCXDXYVSSXXXSRXSXRSXLXLXRXWXXXXXRXLXXXXXAAXSXXXXAXAXXKXKLGXXXAXXXSXLXXLXXEIXXDXXKKXEGWXNRN

SEQ ID NO: 284702 - protein, 98 aa, Glycine max
  Clone ID: PAT_MRT3847_99110C.1.pep
KIVKFTVFLFHQNYLNHFLPFFPIKLLYSISNLMWLIKHLFFSFPLTKFLYFPLLHHPPNFLLWSTIPSQFNIKPPLTSTQTKPSLLPCFFKLFYFLN

SEQ ID NO: 284703 - protein, 81 aa, Glycine max
  unsure (1)..(81): unsure at all Xaa locations
  Clone ID: PAT_MRT3847_99111C.1.pep
KSYTIIXYHSTFFNQHGLTTSFFXSLLPLNNHIXXPSPXSXQXITYXFXXSITFFLSNIFFTNFYIXXPPYNLLIYLTFYH

SEQ ID NO: 284704 - protein, 96 aa, Glycine max
  Clone ID: PAT_MRT3847_99112C.1.pep
KLRIMGAQKRANPWPPLLQKPVPFFPFIKKLTPPIFKKGVSFEDSKKKAWISNSLFKVHPSNNFYNNFLKLHQALHSHLFSSLQSLKKKIFLFFLL

SEQ ID NO: 284705 - protein, 89 aa, Glycine max
  unsure (1)..(89): unsure at all Xaa locations
  Clone ID: PAT_MRT3847_99113C.1.pep
CLXNRKWXTNSANXGSXKGLERKTXXVNQWAPAPVLGXXCPSSWLCAGRPQSXVSPGTCSAPSDTSCSXPSILIXSLLFASDSLSLSCE

SEQ ID NO: 284706 - protein, 60 aa, Glycine max
  Clone ID: PAT_MRT3847_99114C.1.pep
ERRVTNYSNGPCHIKNQHPQSIRFRTIHIISYPIGGYIFNNQLKKRRILIIQIKPWSQMQ

SEQ ID NO: 284707 - protein, 79 aa, Glycine max
  unsure (1)..(79): unsure at all Xaa locations
  Clone ID: PAT_MRT3847_99115C.1.pep
MSFRRGNWWFRNPWKFRNRCRRWKMFPNLNYNELTNNENLGKGIGPIXAQFXNAEMGVPAEKNSCKCVANCTCEPCTCT

SEQ ID NO: 284708 - protein, 144 aa, Glycine max
  Clone ID: PAT_MRT3847_99116C.1.pep
KMTCQNQRLHLWHWVYQTSLRKLHFQTCHFYILPSSPCCEKTLHPYFPFGLHVNINSAGVKALFNQWEIFPCSIAYGDTVASLSFYNWQEFLRGFIKGAGSFFERIFFFPTLVTPSQKSRCPFADSYSLALEAPKNFVASPGWG

SEQ ID NO: 284709 - protein, 42 aa, Glycine max
  Clone ID: PAT_MRT3847_99117C.1.pep
CVYKRPAAEMIRAVNKFKDDFGGQVVALERVQPSSDHVPHSG

SEQ ID NO: 284710 - protein, 111 aa, Glycine max
  Clone ID: PAT_MRT3847_99118C.1.pep
GRGPINIGGKNPWRNKLGELKLLKKKLRVWSRIGGDSLIAKSFYKIKGGGGKYRVRRGNIIYNLGPKKENSLWGGRLKGWENIKFFIYFMGSQEDFFLKGEFFFYNPPLGL

SEQ ID NO: 284711 - protein, 49 aa, Glycine max
  Clone ID: PAT_MRT3847_99119C.1.pep
MGFSVTTLIFAVIGIVASLCTRICFNRGPSANLYAMLASSFLSGTYEVI

SEQ ID NO: 284712 - protein, 126 aa, Glycine max
  unsure (1)..(126): unsure at all Xaa locations
  Clone ID: PAT_MRT3847_9911C.1.pep
PSGLPPPFGVCXVCLGACGFLCFASLLGSRRCCVFRGSALPPVSVVVPFPRCCFPSXGXRVCVLCCFSXVLFGAFPVFXPXFLFCFVWLPXSWWVPSXVRFSRGARGVSALSFRPXLVGRVGGRRG

SEQ ID NO: 284713 - protein, 89 aa, Glycine max
  Clone ID: PAT_MRT3847_99120C.1.pep
PQNMATAMLQLTERTYDECWGHFGNSAALTHISRSRAGANFIYRHWWSLFAAQLCEQTRLVATREVRAYTASIITPRTLRLSPPESSLH

SEQ ID NO: 284714 - protein, 41 aa, Glycine max
  unsure (1)..(41): unsure at all Xaa locations
  Clone ID: PAT_MRT3847_99121C.1.pep
AKANSGVQHKPKSHRXNSLSALXWRWITXXXXXPXXXRXXC

SEQ ID NO: 284715 - protein, 198 aa, Glycine max
  unsure (1)..(198): unsure at all Xaa locations
  Clone ID: PAT_MRT3847_99122C.1.pep
RAAANDFARIFHRSTLSRGVQVQSYKHDSAFHEFSWKKSKDKGVRSCLVECIGGILHEYLSTEVWNVPIDGRIADLQLNAAVEEDISLYFFQDAAMLREVIIDGVGIFNLCLGRDFVSSGFLHSSLYLLLENLSSSNYRVRNAADSVLHILTTTSSYTTVGQLVLENADYVIDSICQQLRHXLDLNHHVPNVLAFMLS

SEQ ID NO: 284716 - protein, 36 aa, Glycine max
  Clone ID: PAT_MRT3847_99123C.1.pep
RARVVLGVDSLDSSAIYHLRIGLGRERGNFRVPLGE

SEQ ID NO: 284717 - protein, 349 aa, Glycine max
  unsure (1)..(349): unsure at all Xaa locations
  Clone ID: PAT_MRT3847_99124C.1.pep
MPPWFSYVGSIKLYQPLAGILRFVGLSLVADNISEGLLSHVIDILLGHFRRLVSELRLKEYNKESWQSWYDRNGSGQLLRQASTAACMLNEMIFGLSRAATNDFARIFHRSTLSRGVQVQSYKHDSAFHEFSWKKSKDKGVRSCLVECIGGILHEYLSTEVWNVPIDGRIADLQLNAAVEEDISLYFFQDAAMLREVIIDGVGIFNLCLGRDFVSSGFLHSSLYLLLENLSSSNYRVRNAADSVLHILTTTSSYTTVSLLVGQLVLENADYVIDSICQQLRPLDLNHHVPNVLASMLSYIGVAHKILPLLEEPMRSVSTETXILGRHQHXDLTVPFLKXVVENCEGIKT

SEQ ID NO: 284718 - protein, 514 aa, Glycine max
  unsure (1)..(514): unsure at all Xaa locations
  Clone ID: PAT_MRT3847_99125C.1.pep
VLRKNSFRSGIPAELSSYYQLERLDISSNSFVGPFQPGLLSLPSITYLNISGNKLTGMLFENLSCNSELDVVDLSSNLLTGSLPRCLVSNSSDSTVLYARNCLDTTNQNQQPQPFCHTEALAVGILPETKKHKQVSKVVLSLGIVGGTLGGVALVLLVFFIVRRGNDRSKTKNPPTRLISENAASGYTSKLFSDARYISQTKKLGAVGLPTYRSFSLEEIESATNYFDTASLMGEDSYGKXMKKRHSTQNFVQHIELISKLRHRHLVSAIGHCFECSLDDSSVSKVFLVFEYVPNGTLRNWISDEHARKSFSWTQRIGAAIGVAKGIQFLHTGIVPGVYSNDLKIEDVLLDQNLVAKISSYHLPLLSNMGKVRRGNSSSGLKNSSNSKSVKQEDKSDIYNFGVILLELILGRQIKTVNDADAFRDLLQASLGGDEEGRRGVVDPAFRKACLDQSLKTMMEICVRCLVKEPADRPSIEDVLWNLQFASQVQDAWRGDSQSSEGSPGSESRGLPFH

SEQ ID NO: 284719 - protein, 781 aa, Glycine max
  Clone ID: PAT_MRT3847_99126C.1.pep
MANRHHPSVFLVLVTVLLSIHCSEQLQSSHSQTLLRIQQLLNFPAALSNWNSNTDFCNTDSNSSLTVVCYEDTITQLHIIGERRDTPLPRNFSIDSFVTTLVRLPSLKVLTLVSLGIWGPLPSKIARLSSLEIVNMSSNFLYGSIPQELSSLSSLQTLIFDNNMLADTFPHWLDSLQALTVLSLKNNKFNGSLPKSLGNVENLRTLSLSHNHFYGAVPDLSRLTNLQVLELDDNAFGPQFPQLGNKLVILVLRKNSFRSGIPAELSSYYQLERLDISSNSFVGPFQPGLLSLPSITYLNISGNKLTGMLFENLSCNSELDVVDLSSNLLTGSLPRCLVSNSSDSTVLYARNCLDTTNQNQQPQPFCHTEALAVGILPETKKHKQVSKVVLSLGIVGGTLGGVALVLLVFFIVRRGNDRSKTKNPPTRLISENAASGYTSKLFSDARYISQTKKLGAVGLPTYRSFSLEEIESATNYFDTASLMGEDSYGKMYRGQLKNGSLVAIRCVEMKKRHSTQNFVQHIELISKLRHRHLVSAIGHCFECSLDDSSVSKVFLVFEYVPNGTLRNWISDEHARKSLSWTQHIGAAIGVAKGIQFLHTGIVPGVYSNDLKIEDVLLDQNLVAKISSYHLPLLSNMGKVRRGNSSSGLRNSSNSKSVKQEDKSDIYNFGVILLELILGRQIKTVNDADAFRDLLQASLGGDEEGRRGVVDPAFRKACLDQSLKTMMEICVRCLVKEPADRPSIEDVLWNLQFASQVQDAWRGDSQSSEGSPGSESRGLPFH

SEQ ID NO: 284720 - protein, 423 aa, Glycine max
  Clone ID: PAT_MRT3847_99127C.1.pep
MEGRGGGEVRRLHIIYFLSQIGGRADHPHLIRVLHLARNGVYLRDVKRWLGELRGKDLPDAFSWSYKRRYKSGYVWQDLLDDDLITPISDNEYVLKGSQIHPTPFATTPSLDEKKTTVCDIHAEKKCSQVQTIEDKNQQPPLAEEEPRIQRDLDLKTDTPTKGSSEISQDSSLVFSSDRSSVTDDDSSKVEEEKHLEATGKDGFNEINQDKLEDCSLPSLYHNLLSTKASHKDDLNKTSSPESSSSTISSSSSQSSFTKIRSNSARVSNVFRNWITCGTVETNDAALVQMNPAQKNLSKEPINIPERRAEICKGDKLGGSARCFRTSWGPHHQKQQYGARKSFEGNETNRSRKKLGELLNQTSSKPFGGPTCSQCGKSFKPEKMHKHMKSCKGMKALGKSSTTVEEAQLQGSSASYTDYFLTN

SEQ ID NO: 284721 - protein, 57 aa, Glycine max
  unsure (1)..(57): unsure at all Xaa locations
  Clone ID: PAT_MRT3847_99128C.1.pep
VNASSSSSIHXHEIEMGHLDHDPPQNINEPNSTLVSSGSNQHEIDIEHKKEFSFEKR

SEQ ID NO: 284722 - protein, 199 aa, Glycine max
  unsure (1)..(199): unsure at all Xaa locations
  Clone ID: PAT_MRT3847_99129C.1.pep
MQTVVELIVLVPNHKSLEGFVIKGQTRHHHQSLIKMGCFPCCKSEAESSSSNASAGKISKGRRTFKSLASVMSHKTGSSRQRRIDAEIRKYGSAKNDVKVFTYAQLAEATNNYNSDCLVGEGGFGNVYKGFLKSVDQTVAVKVLXREGAQGTREFFAEILMLSMVQHPNLVKLVGXYCAEDHIGFLVYEFMSNGEFGKS

SEQ ID NO: 284723 - protein, 110 aa, Glycine max
  unsure (1)..(110): unsure at all Xaa locations
  Clone ID: PAT_MRT3847_9912C.1.pep
YYVQHGYGVVYSNXSLCDAGVIKVVAPTLYETLNNYYKLVSLGFKITFLSGSTLCLLAVTLAYFQNAGYHTYENLILKDPQDPCTPNASSYXTSSIETLMRLGYNIVDII

SEQ ID NO: 284724 - protein, 43 aa, Glycine max
  Clone ID: PAT_MRT3847_99130C.1.pep
FKGIVGHKKETCLLQIRNKINKKNLITVFVLKFETLLFSIIDI

SEQ ID NO: 284725 - protein, 171 aa, Glycine max
  unsure (1)..(171): unsure at all Xaa locations
  Clone ID: PAT_MRT3847_99131C.1.pep
VAKGTVRVGAVASIASSILPPAIXAYLDQWPGLHFEVFEGVWDLLAASLSKHEIDLALGAEAPDTDEIVAIRDCCWEDTSHVIVASGHPLRRRRKLTLADTLHEKWTIPPPGTGPHQHVERVFAEQGLGMPDVIVRTRSITVLKSLAVDSGFLSWMAEPMFEPERRAGLIA

SEQ ID NO: 284726 - protein, 147 aa, Glycine max
  Clone ID: PAT_MRT3847_99132C.1.pep
MDCFFVSVVIRNHPELLGQPVAVCHSNNSNGTAEISSANYPARSHGIRAGMFVRDAKALCPHLVIFPYNFEAYEEVADQFYSILHQRCKKVQAVSCDEAFLDATDSEVEDPELLASSIREEIYKTTGCTASAGIAGNMLMARIATRT

SEQ ID NO: 284727 - protein, 182 aa, Glycine max
  Clone ID: PAT_MRT3847_99133C.1.pep
LALPLSISNSLSEIRMASQSNTKSVHDFTVKDARGNNVNLADYKGKVLLIVNVASQCGLTNSNYTELNQLYEKYKGKGLEILAFPCNQFGAQEPGTNEEIVEFACTRFKAEFPIFDKVDVNGDNAAPLYKFLKSSKGGLFGDSIKWNFSKFLVDKDGNVVDRYAPTTSPLSIEKDIKKLLDA

SEQ ID NO: 284728 - protein, 317 aa, Glycine max
  unsure (1)..(317): unsure at all Xaa locations
  Clone ID: PAT_MRT3847_99134C.1.pep
MDDGLQHENSRHKMEFYRGARPLWDADPQHRXKEPNALVMNKKIRSIMAERQAAILEIELETAISEKNEALAARDAAIQQRDEALAQRDNALLERDNALAALQSRNNSVNFPFGGGIQCGSKRMHHSSNHLSNMTEAAYSTKDMIIRDASPVTVIPSEAVNSHQAKRTKQNKVINSKASKPPCKVKKMGEDLNRQASSEGTKIRSEWDRQDVGVNLVAFDETIMPVPVCTCTGIPRQCYKWGNGGWQSSCCTTTLSMYPLPQLPNKRHARIGGRKMSGSVFTRLLSRLVSEGHDLSIPLDLKEYWARHGTNRYITIK

SEQ ID NO: 284729 - protein, 36 aa, Glycine max
  Clone ID: PAT_MRT3847_99135C.1.pep
KESDLNDGSWETICLNDLNNIEGIKSFWDEVVGICN

SEQ ID NO: 284730 - protein, 110 aa, Glycine max
  unsure (1)..(110): unsure at all Xaa locations
  Clone ID: PAT_MRT3847_99136C.1.pep
MITKASHRERERLMIXXXRLNKSSDRINDSRGXMLETEXLGISILQDLHSQRQXLLHTHDTLHGVDDNTDKSKKILSNMSRRMDKSKWILSTIAVLLIFVIILIXYFKLS

SEQ ID NO: 284731 - protein, 240 aa, Glycine max
  Clone ID: PAT_MRT3847_99137C.1.pep
RLREDDRRADGVVIPKKVLKAIDIKPFPVLWHEDNIGQRQQARERLQVPGAIAGSQLGEAAHRLVKNTLNIKSNNTSHGLLEQPPVHHTMNRHRSAGYGKYYGENISGYYGQYNHHGITRPKYGGQNDRQNLKIQDRLHNQEQFHNTKSEFVALTMEEGERPRSSRLPNSRPVTNLQPRFMQNMDPSIPPPKWMTRTPPMNGMHTRHQEAALGPATHDKQTKKVYQVKTRQPDTPEYGKQ

SEQ ID NO: 284732 - protein, 71 aa, Glycine max
  Clone ID: PAT_MRT3847_99138C.1.pep
FLARKFCLTRNQVHEYLFKTANMWLVLPPFQSLAHYQWGIMSIQDTAKRDLYFTLDSKKTLNSIDLPMALE

SEQ ID NO: 284733 - protein, 113 aa, Glycine max
  Clone ID: PAT_MRT3847_99139C.1.pep
KRSITVLTSEMSGSGKKRSSKWDLRDNPDFSPDDGKQLRSGWSSAGDKLKHFSGGRGSNKDNIMNKDYRVLDSTMEWDEDESYDHKMSPGLDAWKHKRHNSQSPKNGWSRSVS

SEQ ID NO: 284734 - protein, 57 aa, Glycine max
  Clone ID: PAT_MRT3847_9913C.1.pep
LTDKLVNPIERFHEILQTNFPISTKCLFYPFKWYYELVSDSVTGNQLVLKLCCFLLM

SEQ ID NO: 284735 - protein, 61 aa, Glycine max
  Clone ID: PAT_MRT3847_99140C.1.pep
PLVPPGVYDAADAAIEAVSVVSVVADTSAGRALRAALGSSGIVHPSNLILLSRVRRSQRSL

SEQ ID NO: 284736 - protein, 84 aa, Glycine max
  Clone ID: PAT_MRT3847_99141C.1.pep
SCFPFRNVKLVMPSIILILMGWYLVSLIQFLLVCFLVLSLTNNVDMLLIMNLLRGSRTPKGSLLTLGPSWSSMLHACLCDGQIQ

SEQ ID NO: 284737 - protein, 39 aa, Glycine max
  unsure (1)..(39): unsure at all Xaa locations
  Clone ID: PAT_MRT3847_99142C.1.pep
PQXXXYCWXSXEXXXDXXGVGWPLNAPVNACRCHKWXXX

SEQ ID NO: 284738 - protein, 62 aa, Glycine max
  Clone ID: PAT_MRT3847_99143C.1.pep
LTNINTYISAFFHSIFSLAFSTFSLFLTVWNNIRVLIIQFEEPKVCSFIYSLYRSFLICLRL

SEQ ID NO: 284739 - protein, 123 aa, Glycine max
  Clone ID: PAT_MRT3847_99144C.1.pep
SSRTAALFFLFSSDSTFIAFLKRVTLGSVEVTLLSHTRHISIICCLLLSIAQYNNTTYFRSHTHYLDRFPLILHKGLDLRTWRYATYHMCLYIDRIPAYDEWKAIYVCMNFRECNQELSLRVA

SEQ ID NO: 284740 - protein, 49 aa, Glycine max
  Clone ID: PAT_MRT3847_99145C.1.pep
KSMYNLLKQCVKKRNYHTHSEYTSNYFVGLQFEFLIHAELTISFCSYIN

SEQ ID NO: 284741 - protein, 50 aa, Glycine max
  Clone ID: PAT_MRT3847_99146C.1.pep
HGGELQNDWENHVNTLVNHLALHTCLAAAFFLRAVPIGLANRWANGMGTG

SEQ ID NO: 284742 - protein, 81 aa, Glycine max
  Clone ID: PAT_MRT3847_99147C.1.pep
VNCFFISLCVSNPNYIHGRGIWGLMTYGLIHISSMQSELKDLDSKSTNGYGNNARDDRSLMKPLTPASDDSIVDMEKKFAD

SEQ ID NO: 284743 - protein, 101 aa, Glycine max
  unsure (1)..(101): unsure at all Xaa locations
  Clone ID: PAT_MRT3847_99148C.1.pep
WDSINAEHDRAAGLDHGTIVWRIAEDYPHGENLNPGVPGYCPRPAPRDXSTGPLAVRREHKTAKEVKKELXEPEEVKLVMLNFGAQPSEVKPKEESLPPGW

SEQ ID NO: 284744 - protein, 100 aa, Glycine max
  unsure (1)..(100): unsure at all Xaa locations
  Clone ID: PAT_MRT3847_99149C.1.pep
MSDINDPSIFLCPMSLDIIDEIRVTGLIGHHHTTRESIQTXLFSKKNTTCPITKLALIDYTHLTPYHTLYRLIHAWCCMNAAHEIERIPTPKPPFKQNQI

SEQ ID NO: 284745 - protein, 65 aa, Glycine max
  unsure (1)..(65): unsure at all Xaa locations
  Clone ID: PAT_MRT3847_9914C.1.pep
LEISIGPSVLLHVRXLQKTVSSYIPMSYKGAVFSFLIGLVVQSYDISKTHQKQSGRVGPRGIPDR

SEQ ID NO: 284746 - protein, 41 aa, Glycine max
  Clone ID: PAT_MRT3847_99150C.1.pep
ELSGVADNTAPMFLCFTCNYRIIPSFCGLVWLSFKNSSVWG

SEQ ID NO: 284747 - protein, 114 aa, Glycine max
  Clone ID: PAT_MRT3847_99151C.1.pep
SSRFGSGVSAYFNKPHTERNHKTSYSTTVQGVVDHRGVFTDVCIGWPGSMGDDQVLEKSSLFHRANNGGINLSGVWVVGGCGYPLLDWVLVPYTQQNLTWTQHSFNEKIGEVRR

SEQ ID NO: 284748 - protein, 104 aa, Glycine max
  Clone ID: PAT_MRT3847_99152C.1.pep
KQNRGMPKQRGQILPGKKLLVFAFQETSQKPPFHQCFPCDLVNILNDHKRSICPKKMVYDNPNFGLYIEKASPPMWRKKKKGYGDLPIMQNPLYFYGGPKPPNF

SEQ ID NO: 284749 - protein, 748 aa, Glycine max
  unsure (1)..(748): unsure at all Xaa locations
  Clone ID: PAT_MRT3847_99153C.1.pep
MSILPSQTQAASSSSSSAPSPNPNSQHGIGIPIPQPFPSLSPSPINLTFGSLQISDTPGSSASAAQDSGGSSEKVTEVGSPSGVMVSPQQNSRTGSRSHGGRRTGMGTGTASYHRNQQTPGSVHSHGSAPSAGRKAQTVNGNYLLNFQYDPISRSQPRGPPPSPTTTRRHRKRKPYNKXLFLQANYKFMVLGLGNYSPESMDPDKMLQWEDIICVTYLTPFSVQCPICLEYPMCPQITTCGHIFCFRCILQYLLMGEEDHKGDSWKRCPLCFVMISAKDLYTLHITNVKQYQVGDNVEFTFLTRKKDSFTLSLKNKRETNTTSGVDGDICDPFSKFTLISDVDLSVKHAISDLDGWLARADSGLVDDLEKLPYVCAAMQQLEQRKRYWSEHRSHDSEKSSMIIDCGHQIPSTVANSMDTDDENCSNGSITSSSDFLDQNKVMMLDKSTAGACSDQNLDVEKELIEQEMNLSSSYEEKNDNQRHSEGVIGDVKENSSYSFYQAADGQHLILHPLNMKCLLHHYGSYDMLPHRISGRILQLETVTQTEAIRRRYRFLSHFPLTTTFQLCEVDLSEMLPPEALAPFIDEIKKRANQRKQLAKKEKKEKIKAEATAAYSLPISLSHQFTSRDDPPTFSMDDFEALGNSTISSSPPLAGERKSFSNVTRLGFAAAHDSPSLQIQETSGLHNNNRTSDSSVSTGLRNGETQSYSNVISRAESNISSNAPKTNELGKKGKKPNRVLLSTAGGRRY

SEQ ID NO: 284750 - protein, 77 aa, Glycine max
  Clone ID: PAT_MRT3847_99154C.1.pep
TTINISDSYNMNDTSLCTTAYDVLFYVYRDLRYMQWPTEYNLLTVKTVIVPDVTAFEIMQIYAVAVVTKMTASIAVI

SEQ ID NO: 284751 - protein, 57 aa, Glycine max
  Clone ID: PAT_MRT3847_99155C.1.pep
GIQCQAFNPVGIYNASSYTTSVYNDPRLVASPYRVTLLFTSNDAILAYLRTMKRTRR

SEQ ID NO: 284752 - protein, 122 aa, Glycine max
  Clone ID: PAT_MRT3847_99156C.1.pep
MPRQNEQTRRGTCHRHDCEKRREGARERDEQSAGDRGSAAPTRTDTTAPRGPPQPTTRTTRTHATADSNKTTTSPSTEPQNTGTTPTATTSARPTRTRSDTRRPTETTWTTTTKRPGKTSEA

SEQ ID NO: 284753 - protein, 61 aa, Glycine max
  Clone ID: PAT_MRT3847_99157C.1.pep
GTPASPAGGARAVLLIEITSNSETRMKGLGCLRATYMVCMATDCSCDIARSPNDNWLWCTD

SEQ ID NO: 284754 - protein, 85 aa, Glycine max
  Clone ID: PAT_MRT3847_99158C.1.pep
RFCGWVLAGLFVLGRSLQGLKLEHFMDGQLLLWVKDITSLMDWHGLLVLWSYVVIPVFTVTVELTPIRDPQADDDGLPHQQLCLM

SEQ ID NO: 284755 - protein, 327 aa, Glycine max
  Clone ID: PAT_MRT3847_99159C.1.pep
MRSTKYLEPIRLERLRGSVWRAINKQSGEVVAIKKMKKKYYSWEECVNLREVKSLRKMNHANIVKLKEVIRECDTLCLVFEYMEYNLYQLMKNREKLFSENEVRNWCFQVFQGLAYMHQRGYFHRDLKPENLLVTKGVIKIADFGLAREISSLPPYTEYVSTRWYRAPEVLLQSHLYSSKVDMWAMGAIMAELFTLRPLFPGSSEADEIYKICSVLGSPTTESWADGLKLARDINYQFPQLASVHLSTLIPSRSDDAISLVTSLCSWDPCKRPTAAEVLQHPFFPGSELLLHPSIPSHQSCNQNSTICWDQGITGSAGPQEILWCFA

SEQ ID NO: 284756 - protein, 48 aa, Glycine max
  Clone ID: PAT_MRT3847_99160C.1.pep
KLQSALLNIAPYYSPHCLLPTLSSQFRFLFNCFLLYLSFVHVIFFIKR

SEQ ID NO: 284757 - protein, 427 aa, Glycine max
  Clone ID: PAT_MRT3847_99161C.1.pep
FVLILQVAIKKMKKKYYSWEECVNLREVKSLRKMNHANIVKLKEVIRECDTLCLVFEYMEYNLYQLMKNREKLFSENEVRNWCFQVFQGLAYMHQRGYFHRDLKPENLLVTKDVIKIADFGLAREISSLPPYTEYVSTRWYRAPEVLLQSHLYSSKVDMWAMGAIMAELFTLRPLFPGSSEADEIYKICSKIDSPTTESWADGLKLARDINYQFPQLASVHLSTLIPSRSDDAISLVTSLCSWDPCKRPTAAEVLQHPFFQSCFYIPPSLRTRAVTRTPPSAGTRGSLDRLGLKRYSGALPNTKITNNFTSPKVQASIASGVQRKLDMANEDGIKSKKSLKTTQQSKYRLPGKGSPTSINKGRTARGVSETAEKLVNMSIGTRRLSLGQTRPPPMKAGVNWISESGNLLRSGQQIPTERTLTRKVAG

SEQ ID NO: 284758 - protein, 65 aa, Glycine max
  Clone ID: PAT_MRT3847_99162C.1.pep
SLSVMQVRSSTCLHMRLQRGMFWSHDVSFLTAQYGIANKAILARYTMKTNFCYVVKLFSLKTHIL

SEQ ID NO: 284759 - protein, 74 aa, Glycine max
  Clone ID: PAT_MRT3847_99163C.1.pep
KGSATHSSQHHKPGYKDSWSLFQAAMRDLENNQPAATFNGWALSQFCIRTPHISSTNAANLHHFAFLNNLGEEQ

SEQ ID NO: 284760 - protein, 162 aa, Glycine max
  unsure (1)..(162): unsure at all Xaa locations
  Clone ID: PAT_MRT3847_99164C.1.pep
MDKYETVKDLGAGNFGVARLMRNKVTKELVAMKYIERGPKIDENVAREIMNHRSLRHPNIIRYKEVVLTPTHLAIVMEYAAGGELFERXCSAGKFNEDEARYFFQQLISGVHFCHTMQICHRDLKLENTLLDGSPAPRLKICDFGYSKSSLLHSRPKSTVGT

SEQ ID NO: 284761 - protein, 349 aa, Glycine max
  Clone ID: PAT_MRT3847_99165C.1.pep
MDKYEAVKDLGAGNFGVARLMRNKVTKELVAMKYIERGPKIDENVAREIMNHRSLRHPNIIRYKEVVLTPTHLAIVMEYAAGGELFERICSAGRFSEDEARYFFQQLISGVHFCHTMQICHRDLKLENTLLDGSPAPRLKICDFGYSKSSLLHSRPKSTVGTPAYIAPEVLSRREYDGKLADVWSCAVTLYVMLVGAYPFEDQDDPRNFRKTIQRIMAVQYKIPDYVHISQDCRHLLSRIFVANPLRRITIKEIKNHPWFLRNLPRELTESAQAIYYQRDSPNFHLQSVDEIMKIVGEARNPPPVSRPVKGFGWEGEEDLDEEVEEEEDEDEYDKRVKEVHASGEFQIS

SEQ ID NO: 284762 - protein, 50 aa, Glycine max
  Clone ID: PAT_MRT3847_99166C.1.pep
CFNFSSLKCVFQLSNENIKTNNFRNIIYDNIKLSKYRLMTNVFKSVIWRF

SEQ ID NO: 284763 - protein, 114 aa, Glycine max
  Clone ID: PAT_MRT3847_99167C.1.pep
AGGGLINPFFQASPRGPSYNIFPLVPKGALGLPKGVPFTPKIFPTFKIGKNPWWGKKNLLNKKGIPTKKGYYCKSTLSQKFHISIKKKTFSFFPIKIKRWVENIKRLPLRTPLI

SEQ ID NO: 284764 - protein, 59 aa, Glycine max
  Clone ID: PAT_MRT3847_99168C.1.pep
ESTSIIILGNPLPQANLNPMRRPLHPPLKCDITQGPFKDPPYAAILNEEVEGIVGFPSS

SEQ ID NO: 284765 - protein, 50 aa, Glycine max
  Clone ID: PAT_MRT3847_99169C.1.pep
FPLSLSGSLPSSSFSFFYLRIPPIVKLKFTLSKLYPDSPRKVPPYLLVRC

SEQ ID NO: 284766 - protein, 46 aa, Glycine max
  Clone ID: PAT_MRT3847_9916C.1.pep
IPLYIRYVVVSSLCKLGSSKAAARHLLQSSVMSMMRIPPYDVSSQP

SEQ ID NO: 284767 - protein, 82 aa, Glycine max
  Clone ID: PAT_MRT3847_99170C.1.pep
EKKWFLSPVKGEIGLKIYIASESNSKPKPLSPVFPSEQEKLPPSTPPREPESTISDLPPPPHSIPSGLTDRTLEADLSEELP

SEQ ID NO: 284768 - protein, 78 aa, Glycine max
  unsure (1)..(78): unsure at all Xaa locations
  Clone ID: PAT_MRT3847_99171C.1.pep
FLTXLTNPHLPIKQIXRAYTYQSQTNIYTHTQAKMLQLKLLQLKQTKINIKKSIPEHYHNGLSQXRKIKSMRTKGSGA

SEQ ID NO: 284769 - protein, 91 aa, Glycine max
  Clone ID: PAT_MRT3847_99172C.1.pep
MPSSPTTTSSLHYNGDGDVNDKEDNDDTDCKDSRSDSRTETSAKRTTVKRLQLVWTLQLHKTFVDLVAHLPIKGAVPKTIMQLMNVEGLSL

SEQ ID NO: 284770 - protein, 129 aa, Glycine max
  unsure (1)..(129): unsure at all Xaa locations
  Clone ID: PAT_MRT3847_99173C.1.pep
SHHLAPTDGAALASHMDRCTSLXIWTGFTDTAKDNLVLSAKSNLKXLLLELAGTSHYLVGEDADVXHAVELAHFALFFNQGQSLMSWASXTFVHERVYNEFVEKANARALKTGAGDPYEGGIEHRSHID

SEQ ID NO: 284771 - protein, 79 aa, Glycine max
  Clone ID: PAT_MRT3847_99174C.1.pep
FLKTCYAQGTPGCLIHTNPRTGPCPRRPNAIFAQGSTGRSAKIYPTAHEREESLSLYQGRQMPQLLICDAHECVLDIAT

SEQ ID NO: 284772 - protein, 60 aa, Glycine max
  Clone ID: PAT_MRT3847_99175C.1.pep
TPLKTTIKLNSQKNIKSQWDMLILKVSHYHNIFIHFNNYFLPFSLILKLLIPFLCINSTP

SEQ ID NO: 284773 - protein, 74 aa, Glycine max
  Clone ID: PAT_MRT3847_99176C.1.pep
AGLCPRVNPAPPRCVFLGNFHGAISMYASPECSLYVWSTVSQVSFSSSGGSIHLVGFIKAVLIIIYGWNGLRRL

SEQ ID NO: 284774 - protein, 51 aa, Glycine max
  Clone ID: PAT_MRT3847_99177C.1.pep
VAFSCFIHQSLACFHRKFLRLHVQLVLPKLHFKRALLFSSLVSKKNLTPGK

SEQ ID NO: 284775 - protein, 61 aa, Glycine max
  unsure (1)..(61): unsure at all Xaa locations
  Clone ID: PAT_MRT3847_99179C.1.pep
EEMRYCFVKQFNGCLSGHYYLVGFVWITLCLFGNVVSLSFCFHLALXLCKAVRQSPIAPNS

SEQ ID NO: 284776 - protein, 177 aa, Glycine max
  unsure (1)..(177): unsure at all Xaa locations
  Clone ID: PAT_MRT3847_9917C.1.pep
AAASSMALSSPSLAGKAANLRPSSPKLRRVSMKNTVTNHGSSRNPWYGPNRVKYLRPFSGETTSYLTGELPGDYWWNTAGLSADPXNFTENRELELIHSRWAMLGALGSVFPELLSRNGVNIREAVWITVGSQIFTEGVLDYLSNSRLRHAQSILAICATRVILMGVVEKNPIAGGP

SEQ ID NO: 284777 - protein, 48 aa, Glycine max
  unsure (1)..(48): unsure at all Xaa locations
  Clone ID: PAT_MRT3847_99181C.1.pep
TYFIKGIALVVSQLLLTLSRWVSFXLSYNCSLEIAXGVRSMTFKPQWW

SEQ ID NO: 284778 - protein, 149 aa, Glycine max
  Clone ID: PAT_MRT3847_99182C.1.pep
MSVPKAVAATIRLTVPAGGARPAPPVGPALGQYRLNLMAFCKDFNARTQKYKAETPMAVTITAYKDNTFEFTVKSPPVSWYLKKAAGVESGSSRPGHVTASSLSVRHVHEIAKAKQSDPYLQNMPLESISKSIIGTANSMGIKIVKDLD

SEQ ID NO: 284779 - protein, 74 aa, Glycine max
  Clone ID: PAT_MRT3847_99183C.1.pep
TRPRESLVSSDLGMTPNNDGELIRLSIPQLTSDRRKVFSSSIDAAVSKFIFSLSITFLFSLTESNILNWFSFLI

SEQ ID NO: 284780 - protein, 36 aa, Glycine max
  Clone ID: PAT_MRT3847_99184C.1.pep
IVTTIPTIGFNVDTVEYTNITFPGWDVGGRDKIRPL

SEQ ID NO: 284781 - protein, 179 aa, Glycine max
  unsure (1)..(179): unsure at all Xaa locations
  Clone ID: PAT_MRT3847_99185C.1.pep
MAGVNPNGVADFPATPTHGGQFIQYNIFGNLFEVTAKYRPPIMPVGRGAYGIVXVIGLRDVIPPPLRREFNDVYIATELMDTDLHHIIRSNQNLSEEHSQYFLYQILRGLKYIHSANVIHRDLKPSNLLLNSNCDLKIIDFGLARPTLESDFMTEYVVTRWYRAPELLLNSSDYTSAID

SEQ ID NO: 284782 - protein, 42 aa, Glycine max
  Clone ID: PAT_MRT3847_99186C.1.pep
ESLLFYYFGSKLVATFLKFLKGFSYLIYEKNKSFKKLIIFYF

SEQ ID NO: 284783 - protein, 227 aa, Glycine max
  Clone ID: PAT_MRT3847_99187C.1.pep
MAGVNPNGVADFPATPTHGGQFIQYNIFGNLFEVTAKYRPPIMPVGRGAYGIVCSLLNTETNELVAVKKIANAFDNHMDAKRTLREIKLLRHLDHENVIGLRDVIPPPLRREFNDVYIATELMDTDLHHIIRSNQNLSEEHSQYFLYQILRGLKYIHSANVIHRDLKPSNLLLNSNCDLKIIDFGLARPTVESDFMTEYVVTRWYRAHDLLMNSSDYTSAIDVWSSG

SEQ ID NO: 284784 - protein, 318 aa, Glycine max
  Clone ID: PAT_MRT3847_99188C.1.pep
SSLLNTETNELVAVKKIANAFDNHMDAKRTLREIKLLRHLDHENVIGLRDVIPPPLRREFNDVYIATELMDTDLHHIIRSNQNLSEEHSQYFLYQILRGLKYIHSANVIHRDLKPSNLLLNSNCDLKIIDFGLARPTLESDFMTEYVVTRWYRAPELLLNSSDYTSAIDVWSVGCIFMELMNKKPLFPGKDHVHQMRLLTELLGTPTEADLGLVKNEDARRYIRQLPQYPRQPLAQVFPHVHPAAIDLVDKMLTVDPTKRITVEEALAHPYLEKLHDVADEPICMEPFSFDFEQQQLDEEQIKEMIYREALALNPEYA

SEQ ID NO: 284785 - protein, 118 aa, Glycine max
  unsure (1)..(118): unsure at all Xaa locations
  Clone ID: PAT_MRT3847_99189C.1.pep
QKKIVFRTTSCRLASAGRVLAAPPNETTAFDYTHRKIIVSNVNAAIDAHKLLEYFXQLGEDEDGPLGVYNNTGKPKGGALLVYNNVESAEKAVEEHHNNYDGHTMYCQKAADDANESK

SEQ ID NO: 284786 - protein, 117 aa, Glycine max
  Clone ID: PAT_MRT3847_9918C.1.pep
AHIIQCQSDGHDAFHELLEHEMNQEDTWRGGAAYVNVLHAVMYSIYHDRFPVLLRLHTDLCDRASSRALVNELLRLITCCDDASPEKLPWPIEDLISGGKTNKLVWSHGLDVLTYTL

SEQ ID NO: 284787 - protein, 78 aa, Glycine max
  Clone ID: PAT_MRT3847_99190C.1.pep
EKKSKERSHLIIFHINFPHAWYFKSHKIFQELVKAKESKQVINQKNISINLISYILLTFFRKTNNLSTFSILSKTKYL

SEQ ID NO: 284788 - protein, 134 aa, Glycine max
  Clone ID: PAT_MRT3847_99191C.1.pep
MAPKSMEPHDEAEEDLELERLESDLKQMAHKILDYRTTLPDQLNATLRSILDAQRPFLSPGTSEQNISREESSSAPEDPETAKKLKLLNEKISSNCSAMPIVLKRMKDCIARIEKFDSYNDSMIHPAFKRKKTG

SEQ ID NO: 284789 - protein, 74 aa, Glycine max
  Clone ID: PAT_MRT3847_99192C.1.pep
SYLSEHLRIQVIQHLPTSICSRKPRVLIFLILQVGRKLRFRCIMYFIVWSFVVIFWKASPACKTGYCIVPVPLY

SEQ ID NO: 284790 - protein, 276 aa, Glycine max
  Clone ID: PAT_MRT3847_99193C.1.pep
MVRLTADLIWKSPHFFNAIKERELDLRGNKIAVIENLGATEDQFDTIDLSDNEIVKLENVPYLNRLGTMLINNNRITRINPNIGEFLPNLHTLVLTNNRIVNLVEIDPLASLPKLHFLSLLDNNITKKPNYRLYVINKLKSLRVLDFKKVKNKERLEAKNLFSSKEVIEEIQRTPTKSETPNVSEVIEEQQMPKVVAPTPEQIIAIKAAIVNSQTLEEVARLEKALKSGQLPADLLLDNVDEKHEDMIHDDRGQADGESNDTQEQRNTDSASMEQD

SEQ ID NO: 284791 - protein, 116 aa, Glycine max
  unsure (1)..(116): unsure at all Xaa locations
  Clone ID: PAT_MRT3847_99194C.1.pep
PPGSKGFFFILEKMNGWVKEPPFSPKTDAGVPALGGQKKKPSLEVYSEKLALAFGVFRPRPGAAIKIVKNLRVGFDCPPVMKIMFKIFGRKIIIKGRNRFPPFXNGSCSCRGFWGT

SEQ ID NO: 284792 - protein, 287 aa, Glycine max
  Clone ID: PAT_MRT3847_99195C.1.pep
MVRLTADLIWKSPHFFNAIKERELDLRGNKIAVIENLGATEDQFDTIDLSDNEIVKLENVPYLNRLGTMLINNNRITRINPNIGEFLPNLHTLVLTNNRIVNLVEIDPLASLPKLHFLSLLDNNITKKPNYRLYVINKLKSLRVLAWEKVKNKERLEAKNLFASKEVIEEIQRTPAKTFSTGETPNVSEAIEEQQTPKVVAPTPEQIIAIKAAIVNSQTLEEVARLEKALKSGQLPADLISLSDNIMLDNVDEKHEDMIHDDRSQADGKSNDTQEQRNTDSASMEQD

SEQ ID NO: 284793 - protein, 69 aa, Glycine max
  Clone ID: PAT_MRT3847_99196C.1.pep
HGWNNISSKITSVFRFYSQYSGLRILKICQRNIKICCLRLTSLSILLFSIQLTPFWDPWKNFHRAFKGL

SEQ ID NO: 284794 - protein, 82 aa, Glycine max
  Clone ID: PAT_MRT3847_99197C.1.pep
CLILYCFLYLGKSLLKIFVYKFYVSSLINPVNVETHAFRLFRAKLERIKGSKGKWKLRPTICTCREKLWARRKPKSHSSSQP

SEQ ID NO: 284795 - protein, 255 aa, Glycine max
  Clone ID: PAT_MRT3847_99198C.1.pep
PRVRPRVRTAARRRQKDTAARRRQKDTAARRRQKDTGVRGRVGCEKTTEGAQFPAHTSCLFSLSLYFGFHCWVLKQICGVAEAMEVQSLSFENNILWVGSFVEALVLDTFLATAKSLACFVILTGSLLTDVNNLVSPMVDGRFPLDQLCKGKHTFEENKDASDTEDDDDDDNVNDGEDDDDDEDDEDFSGDDGGEEADSDDDPEANGGGGSDDDDEDDDDDDDDNDEDDGDEDDEDEGDDDEDEESPQPPSKKRK

SEQ ID NO: 284796 - protein, 57 aa, Glycine max
  Clone ID: PAT_MRT3847_99199C.1.pep
NKNIYLKRSKQKNNKTNTKTSHFNHPTFLPFIQHIPSLLNLNSIHYSHKHHSLENLT

SEQ ID NO: 284797 - protein, 92 aa, Glycine max
  Clone ID: PAT_MRT3847_9919C.1.pep
RLSTLVTYACSQVFKLLRHALAVVSNVILTRVSVISVCIPWFRTSKIPRVLTGIFVYHQGRCSQYQAKVLHDVSWERKHHLLCSLGLQYVSR

SEQ ID NO: 284798 - protein, 45 aa, Glycine max
  unsure (1)..(45): unsure at all Xaa locations
  Clone ID: PAT_MRT3847_991C.1.pep
XXXPSPMXXNNFXXIFCXTRNIFEAXXRXXLTLSRXFXFPLSXSL

SEQ ID NO: 284799 - protein, 36 aa, Glycine max
  Clone ID: PAT_MRT3847_99200C.1.pep
FFSDLTEQIMYEPSLTTPHQVQEALLLYGWVYGASH

SEQ ID NO: 284800 - protein, 78 aa, Glycine max
  Clone ID: PAT_MRT3847_99201C.1.pep
IYMPIKYTLEILVLCITTLFILFYNVIDSLAGCVNNLKVIASIFVSPINFKLISHKFFKKKKKKKKKHAAALEDPSLR

SEQ ID NO: 284801 - protein, 139 aa, Glycine max
  unsure (1)..(139): unsure at all Xaa locations
  Clone ID: PAT_MRT3847_99202C.1.pep
RSLATEDRPETAQALIPQAEHGARHTGEASNPQQTAQADREGTPPRRTPTKTXRTRTPLQREHPPKXQGGQENNRPPATGRGKAQTXXQXKKPPTRKKLKLGGEVYRKVLYDNFPTLPSYLGGSCSCMRCSKIGHSGYS

SEQ ID NO: 284802 - protein, 44 aa, Glycine max
  Clone ID: PAT_MRT3847_99203C.1.pep
LLGYARTSPTSSMFVIFPINLRPEICSSYITVRLKFLSALYFFK

SEQ ID NO: 284803 - protein, 55 aa, Glycine max
  Clone ID: PAT_MRT3847_99204C.1.pep
MVGLTDTGSYAYDSTVLSIHMAKHCVIPATVTLVVHYHKQAPVGSSHALHVWARV

SEQ ID NO: 284804 - protein, 150 aa, Glycine max
  unsure (1)..(150): unsure at all Xaa locations
  Clone ID: PAT_MRT3847_99205C.1.pep
REKKSKSKKKKELLQQTDPPSIAVINLFPSGDVPESEIQQDKDDNLWRTTSRENRKLERLAKPLYNSVHQAAEIHRQVRKYIKSILKPRMLMTNIYKTLENTIRNLISYDNLQAYITFPTRYSLNXITTHYTPNSXDNTILQYYYIMKFD

SEQ ID NO: 284805 - protein, 31 aa, Glycine max
  Clone ID: PAT_MRT3847_99206C.1.pep
SDSFAESHIRDRTSEVFIDLVEKKTDLINYK

SEQ ID NO: 284806 - protein, 85 aa, Glycine max
  Clone ID: PAT_MRT3847_99207C.1.pep
HAGVQIGNACWELYCLEHGIQPDGQMPSDKTIGGGDDSFNTFVSETGAGTHVPRAVFVDLEPPVVDEVRTGTYRQLFHPEQLITG

SEQ ID NO: 284807 - protein, 63 aa, Glycine max
  Clone ID: PAT_MRT3847_99208C.1.pep
CRNRHTKGAFSHEMTDDRVHAIPKLGMYAATDHWTFDAIHRGPLRRVDLDSGTNCWAFDIGDL

SEQ ID NO: 284808 - protein, 79 aa, Glycine max
  Clone ID: PAT_MRT3847_99209C.1.pep
RPEPWGSEGYNVNTQYTSPTVLNMMGNSAPKGKSFHSSLGESTSPSRLRVSAQRQLNLVFLGTILRFKRTITRPKNGNQ

SEQ ID NO: 284809 - protein, 52 aa, Glycine max
  Clone ID: PAT_MRT3847_9920C.1.pep
LTKYANIEAHLRELITVPNYPTSSMLVIGELKYLIVMIDSVYMNNTHELVLD

SEQ ID NO: 284810 - protein, 321 aa, Glycine max
  Clone ID: PAT_MRT3847_99210C.1.pep
MVGTIRLEQSEYIPREPREPSGSGADQETTNKDVNKMLRRLAQNREAARKSRLRKKAYVKQLESSRLKLMQLELEIGKARKQGLYMGTALDAGYIGSTSETINPGIVAFEIEYGQWVEEQERRNEELRHAFQTQAPGVQLNVVVQSVLNHYSNLFRMKAEAVKADVLYLLSGAWKPSVERIFLWIGGSRPSQLLNIIVPQLEPLTDQQIVSINNLRLSSQQAEDALSQGLEKLQQSLVHDMAVDPLGVGNLGLQMARTMEKFEALEGFVNQADHLRQQTLLHMSRILSIHQAARGLLALGEYFHRLRTLCSLWSARSCELA

SEQ ID NO: 284811 - protein, 78 aa, Glycine max
  Clone ID: PAT_MRT3847_99211C.1.pep
EWSNCLRKQQGIGWCRRSLSSTEMTIILAYETKMLRERWTKKKKTGFDAKGAAVKVEEDRKFVVSVVGFGKKHCARRT

SEQ ID NO: 284812 - protein, 172 aa, Glycine max
  Clone ID: PAT_MRT3847_99212C.1.pep
HYSNLFRMKADAAKADVLYLLSGVWKASVERIFLWIGGSRPSQLLNIIVPQLEPLTDQQIVSISNLRLSSQQAEDALSLGLEKLQQSLVHDMAVDSLGVGNFGLQMVLAMEKFEALEGFVIQADHLRQQTLLHMSRILSTHQAARGLLALGEYFHRLRTLCSLWYARPYDLA

SEQ ID NO: 284813 - protein, 92 aa, Glycine max
  unsure (1)..(92): unsure at all Xaa locations
  Clone ID: PAT_MRT3847_99213C.1.pep
DSRKFLYIYTLPFLFLFLLIFFPGAEMLGLEYQYRLKLIVGFPSLLSKFFVECVWLFLLLLFCSDDVFGXFXXWXILWXLGLGLLFXRFCLG

SEQ ID NO: 284814 - protein, 313 aa, Glycine max
  unsure (1)..(313): unsure at all Xaa locations
  Clone ID: PAT_MRT3847_99214C.1.pep
QAGHVGPRHVHVGCSTRVGSCCGGRGRRGMRRLGGIRAXSGSATFGRDSKHVTLDTCDREFGVGSTSTSINSLENTSSAKHCTKTTTVDDHDSVSHSKPVGEDQDEGKKKRANGKSSVSTKRSRAAAIHNQSERKRRDKINQRMKTLQKLVPNSSKSDKASMLDEVIEYLKQLQAQLQMINRINMSSMMLPLTMQQQLQMSMMSPMGMGLGMGMGMGMGMGMDMNSMNRAHIPGIPPVLHPSAFMPMAASWDAAVAAAAGGGDRLQGTPASVMPDPLSTIFGCQSQPMTMDAYSRLAAMYQQLHQPPTSGSKN

SEQ ID NO: 284815 - protein, 124 aa, Glycine max
  Clone ID: PAT_MRT3847_99215C.1.pep
MALEAVNDRKAEVQAFDDSKTGVKGVLDSGVTKIPTMFHVKLDSTHTSPTHSNFTIPIIDLQNINSNSTLHAEVVDQLRSASQKWGFFQVINHGVPVEVLDEMISGIRRFHEQDAEARKPFYWG

SEQ ID NO: 284816 - protein, 47 aa, Glycine max
  Clone ID: PAT_MRT3847_99216C.1.pep
VPMVKSSRDLDFPPRSYKAKGAYLRFNLRTPGKTAFPMRNWPLVKVK

SEQ ID NO: 284817 - protein, 75 aa, Glycine max
  Clone ID: PAT_MRT3847_99217C.1.pep
LDPPIFNNLLRGSFHATSTIPLTRVGLEFGWKLRQQRDFQQCFLLVQNKLIQEIFQDQHDSTTSDQPNRLIAETN

SEQ ID NO: 284818 - protein, 74 aa, Glycine max
  Clone ID: PAT_MRT3847_99218C.1.pep
MITQPPDAAPAVAPNSGEGGEKKSINAELWQACAGPLLNLPSPGTHVVYFPQGHSEQVAASLKKDVDAQVPNYT

SEQ ID NO: 284819 - protein, 82 aa, Glycine max
  Clone ID: PAT_MRT3847_99219C.1.pep
RSRTSPRHINLRQPQNLWYGYANKHLHFVWNNDYIRSSYLGIGRHELHVIAPLDGLQAPNALAQRRLYKVAKIAKYGQANRT

SEQ ID NO: 284820 - protein, 95 aa, Glycine max
  Clone ID: PAT_MRT3847_9921C.1.pep
LRKVFYSVYCKKKGLPEVMISAHLSGVNVVQHKTLSFWRGEKLGLQWAMFSIMGTLNRYKTIIGDVHVHAKNAWKTSRFLIVLKKKRKKEIKKRK

SEQ ID NO: 284821 - protein, 85 aa, Glycine max
  Clone ID: PAT_MRT3847_99220C.1.pep
TLREPTLSFITFYNHKNPTLHTTLITIFTLFFNNTPYIIIEPHLFSFTNIVYLYTNLHFPLKQFPPLKMHIILSIITFSSSIIST

SEQ ID NO: 284822 - protein, 88 aa, Glycine max
  Clone ID: PAT_MRT3847_99221C.1.pep
KTTCKESLSSHDQGTRRACIKQRRVVCIFATFQFCGFAPLFPEHITNTPRHTRVKPKLVPRFAFHHQNGKGQVIIIRKRKQVTMLKDE

SEQ ID NO: 284823 - protein, 101 aa, Glycine max
  unsure (1)..(101): unsure at all Xaa locations
  Clone ID: PAT_MRT3847_99222C.1.pep
MLTFYFSAKTENWRHFLANLNANGEKLLVCGKHYRTVFIXVFMPDIRLRSADQCCMFFFKSGALRHGFGVYPCCAEKICIADAELRYGTHGAFDFTPGKQG

SEQ ID NO: 284824 - protein, 110 aa, Glycine max
  unsure (1)..(110): unsure at all Xaa locations
  Clone ID: PAT_MRT3847_99223C.1.pep
SEDYTRVISHGPNPRTTHIXDNCIVESGCFDVGCSSSPLENVFLPPHISYPSESFMSFCFYCNKNLGQDMDIYMYRGERAFCSRECRNQGMLLEEGMIKLEGGDMYMGHS

SEQ ID NO: 284825 - protein, 38 aa, Glycine max
  Clone ID: PAT_MRT3847_99224C.1.pep
HVHSVIQRQKIKLSYNVLWLGVSSVWLHVCGLLCNKTL

SEQ ID NO: 284826 - protein, 122 aa, Glycine max
  unsure (1)..(122): unsure at all Xaa locations
  Clone ID: PAT_MRT3847_99225C.1.pep
STRFAHASEQSVANLQSISCLGIAFQPIDKHSTSTILQGSTFSSQDQHHAKSCTCYLSSSSPSIQLFQLVHKSGESPLVGSISTSTITTYTNTTTTIMXVTIQQQPSEQPHRTGXLDLPVEI

SEQ ID NO: 284827 - protein, 125 aa, Glycine max
  Clone ID: PAT_MRT3847_99226C.1.pep
GSSSEASILKLKNYLKKGMGLTCEIPAKGPEVKPRDNSGAQGHGFKQNIRGPKIGKSSFKRQSQRILASQTPVSEHKEHAIHIGTESQLSKDTADCENQSCTDEKNNQLLPSIVVEFNFPSGFKY

SEQ ID NO: 284828 - protein, 247 aa, Glycine max
  unsure (1)..(247): unsure at all Xaa locations
  Clone ID: PAT_MRT3847_99227C.1.pep
KDFKLVSSFFSSPKLFANFTSKVLCETEAMMSPTSILDTKPFSXLKNPFRSETNSPRTPVGEYKRYWDELDSKGLVDALGEITSKLQSRMILFGSQLKIQNHPPLAHSTLSPSLSPKSAFGCANSALETSKSPRVFSASEMELSEDYTRVISHGPNPRTTHIFDNCIIESRCFDVGCSSSPLENVFLPPHISYPSETFMSFCFYCNKNLGQDMDIYLYRGERAFCSRECRDQGMMLEEGGDMHMGHS

SEQ ID NO: 284829 - protein, 82 aa, Glycine max
  Clone ID: PAT_MRT3847_99228C.1.pep
RASQPIIKIKGGALFILLSTPCCQGKISFKKKKVHGQHFNINTLSPLYLTSGVKKKKRICTLAHFLAEDRFLKKEKIVYETI

SEQ ID NO: 284830 - protein, 52 aa, Glycine max
  Clone ID: PAT_MRT3847_99229C.1.pep
SKVRSGFGTSLWSVFSSWVLLFFFFYCLAIGRLLYIVRLCCILSLCLTRCIL

SEQ ID NO: 284831 - protein, 96 aa, Glycine max
  Clone ID: PAT_MRT3847_9922C.1.pep
ASGTREGVRCRILDRHVSDYSRAQDNIGHNTLHQLTKGFSCWLVVDLLVIVASGLAHNTRHQFTKGFSFWLVVHLTVIVPSVDVRDVVQRVFNQPS

SEQ ID NO: 284832 - protein, 143 aa, Glycine max
  Clone ID: PAT_MRT3847_99230C.1.pep
PTRPCEKTTEGEARKKVKVDGVEFDWVYGTASVSIMAMAVTVTPYPFFWFGSKGKIQHSPRHNTIDYTATLFHTCALTTLNLDVSRHVPYQCYEMNPLPILAAAIYIRAFPSYRPTMNLWISFLWILSLLSLLLIYDHINLIT

SEQ ID NO: 284833 - protein, 50 aa, Glycine max
  Clone ID: PAT_MRT3847_99231C.1.pep
DTNAKLIKNKDIRLGKTYYYSINMLVIFIDVTITYECMMYVYLISYHSNV

SEQ ID NO: 284834 - protein, 84 aa, Glycine max
  Clone ID: PAT_MRT3847_99232C.1.pep
VILPRERKKHEYHEAIKKRYKHLPEVNRIARHRHLPRPIFKASALMRVMADAKRRKEEKRKAHSAPGSITTQPLRRRRIIKEVE

SEQ ID NO: 284835 - protein, 69 aa, Glycine max
  Clone ID: PAT_MRT3847_99233C.1.pep
IMEHRRFVTLRFASNAFATTPCVCNYVIVTQECRLLGPPQVVKDRAETRALWTDLFTRKKLIREGPMDS

SEQ ID NO: 284836 - protein, 82 aa, Glycine max
  Clone ID: PAT_MRT3847_99234C.1.pep
CKLVGPKLTRLSIVKNRAAREPESRGVQPQLLFRIENYRVFTIAVQMILRRFRCSPQTSDSRMIEPVWSNKVLYSRQTQSQR

SEQ ID NO: 284837 - protein, 235 aa, Glycine max
  unsure (1)..(235): unsure at all Xaa locations
  Clone ID: PAT_MRT3847_99235C.1.pep
HASGDAYMLMYHLKHSKNVGEKGGIVYGANLEVEGNAVTAQDSACLPSHFCKEIQNFNASYLDSCEQYKHRKELELSHINERRQEVRSILAEAPTQPLEQPYFWICSDWLRQWADNIIPIALDNTSIQCSHGKVPVSKVTSMKRLSSKAWDKLLSKYGGGPTLSHEDCCWDCLIDGAQNVVSADTYRDQRESLKRLARDILDGNCEDGMYYVSRPWLQQWWKRXVXDAPSEADAG

SEQ ID NO: 284838 - protein, 254 aa, Glycine max
  unsure (1)..(254): unsure at all Xaa locations
  Clone ID: PAT_MRT3847_99236C.1.pep
MRVGQRVTWKQVSNKNSGSYNLQFSNSHAERVVQCGEMSAYLITAIHLLLVFLSSSTSLSTVFGSEEEQFYAKEILGAAQKEKEWLVSVRRKIHEHPELAFQEYETSSLIRSELDKLGISYTYPVAKTGIVAHLGSGSRPIIAIRADIDALPMQELVEWEHKSKIEGRMHACGHDAHTTMLLGAAKLLNQRQDNLQGTVRLLFQPGEEGSXSALQMINEELLXDVEAFFALHIDTTTPTGAIAFYSRAWTATGI

SEQ ID NO: 284839 - protein, 192 aa, Glycine max
  Clone ID: PAT_MRT3847_99237C.1.pep
GCEKTTEGDIQSLWFNLSRVIFSLLDSIPASSSEQPMEAAATATATVLAPPSAFLGRPSVLAFRSNLRFSTKLSTSVAISKHGHGRHCVGTRRGFVVRAASFTPESSEPSSKIAPLKLESPIGQFLSQILISHPHLVPAAVEQQLEQFQTDLDGDKQKKEPSASGTDLVLYRRIAEVKAKERKTALEEILYA

SEQ ID NO: 284840 - protein, 61 aa, Glycine max
  Clone ID: PAT_MRT3847_99238C.1.pep
MFLIFMDINKFYFSFFKKKKKKKKKKKKKKKKKKKKKKKKKKKKQKKKKKKKKKKRAPPKI

SEQ ID NO: 284841 - protein, 78 aa, Glycine max
  Clone ID: PAT_MRT3847_99239C.1.pep
SLSHITITTRTSPHQGAIVIQQSRYSIRQTQNEYKPARKYQKEPSPTTIHDVTAQLKSAPSLCCHNLNRPAKYLFQPF

SEQ ID NO: 284842 - protein, 52 aa, Glycine max
  Clone ID: PAT_MRT3847_9923C.1.pep
LESFSRVEFCSKWPRTSFCRAFYFRLAREEYQFVLQKKKTKRKKGLLVVSSS

SEQ ID NO: 284843 - protein, 358 aa, Glycine max
  Clone ID: PAT_MRT3847_99240C.1.pep
MASNLIRVSTSLVLVVLVALTVQIFYISPIDPVLLDIKPAPSTKDNQLQNIIKLGEGLLKEPEDVVVDKEGTLYTATRDGWIKRLRRNNGKWENWKHIDSHTLLGIATAKEGGLIVCDTSKGLLKVTEEDGFSVLVSHVNGSQLRFADDVIEGSNGNVYFSVVSTKFDLQDWYLDVLEARPRGQVLKYNPTSNETVIVLDNVAFANGVALSKDEDYLVVCETWKYRCLRHWLEGANKGTTDIFIENLPGAPDNINLAPDGSFWIALIQLTSEGFEFVHNYKITKHLVASFPRLINLVNGCKKKATVVNVATNGRIIRKLDDSDGKVINFVTSAVEFEDHLYLGSLNSNFVGKLPLYSA

SEQ ID NO: 284844 - protein, 35 aa, Glycine max
  Clone ID: PAT_MRT3847_99241C.1.pep
PQIIPIRPVMKAASNASCSHKYQGKLRRGSCLDGS

SEQ ID NO: 284845 - protein, 80 aa, Glycine max
  Clone ID: PAT_MRT3847_99242C.1.pep
EPPLRGLPLGNPRDLLTHNICPANPTCQSIKFSTDLTYYLGTKTHSLPFGPRDFHMTPFNDPLNALDARVSPFGIFSGTK

SEQ ID NO: 284846 - protein, 242 aa, Glycine max
  Clone ID: PAT_MRT3847_99243C.1.pep
YIFVFTGVVSLTPAFAPVVSQSAGSSAPVDKDKFIRPETLNNFVIFRTSDFTTVSKEVHVRTRRVQLVGLEGAGKTTLLKAVLHKCKPNTAANEDAASEVVREVIADGLCYCDSNGINMQELNVETSRFRDELWLGIRDLSRKTDLIVFVHNLAHSIPRCSNSNDTQQRPVLSLFLDEAKSLGIPWVLAITNKFAVSAHHQKTAIDAALKAYQASPSSAEVINSCPYVMPGFVGASLSLDAT

SEQ ID NO: 284847 - protein, 67 aa, Glycine max
  Clone ID: PAT_MRT3847_99244C.1.pep
MASSGAVPCWRTAGRTYRRGANICANLVRSCLREPDEAEAVSREKVDFALSKWVDAKPEGPGIRSET

SEQ ID NO: 284848 - protein, 65 aa, Glycine max
  unsure (1)..(65): unsure at all Xaa locations
  Clone ID: PAT_MRT3847_99245C.1.pep
RELSWHSPKEACQLRRKAFSLIXRLQKVDVPTIAQIEESHSMQTMMNAADSXNDCVDLFVSIDLL

SEQ ID NO: 284849 - protein, 39 aa, Glycine max
  unsure (1)..(39): unsure at all Xaa locations
  Clone ID: PAT_MRT3847_99246C.1.pep
WLSKIRANKSGPDSSLTLTMTRGXATNTPKLEVEKPRKL

SEQ ID NO: 284850 - protein, 96 aa, Glycine max
  Clone ID: PAT_MRT3847_99247C.1.pep
RHETFLFDNLNPNFGQKPHIQNLYLNMILPNKKILISFTNKPCKSNNFSCLPFFLHCRTCRKTLISCGSKPLYKYLAYLTLQYTLLPMKGGMLSYT

SEQ ID NO: 284851 - protein, 466 aa, Glycine max
  Clone ID: PAT_MRT3847_99248C.1.pep
DKSKHPIMWESESESGAGREYGSGLLTSTKHSLKTEGFQQRGNCWYVSTDIPSDLLVQIGDANFHLHKYPLLSRSGKLNRIIYDSRDPDLSKIVMDDLPGGPEAFELASKFCYGIAIDLTSGNISGLRCAAEYLEMTEDLEEGNLIFKTEAFLSYVVLSSWRDSIVVLKSCEKLSPWAENLQIVRRCSESIAWKACANPKGIRWSYTGRAPKVASPKWNDMKDSSPSRNQQVPPDWWFEDVSILRIDHFVRVITAIKVKGMRFEMIGAGIMHYAIKWLPGLMNKDTSIPGEEGSNSSTSNSISSSGGSWKGGLHMIVAGPRDDTSTLQAKDQRMIIESLVSIIPPQKDSVSCSFLLRLLRMANNMLKVAPALITELEKRVGMQFEQATLADLLIPCYNKNETTYDVDLVQRLLEHFLVQEQTESSSPSRPPFSDKHVSSNINAKTRVARLVDSYLTEVSRDRYLSL

SEQ ID NO: 284852 - protein, 41 aa, Glycine max
  Clone ID: PAT_MRT3847_99249C.1.pep
MNLLGVFSVASSSEQVSKSFYGPRLPLFMSTSTSGAFKLEF

SEQ ID NO: 284853 - protein, 75 aa, Glycine max
  Clone ID: PAT_MRT3847_9924C.1.pep
GLFEYQFSLRHCCSLTLSPKSLIRCLLSNQGSFTSSLSILQPSFITPSPSSSIPCLKHSRTLGSTHASAHASAHA

SEQ ID NO: 284854 - protein, 59 aa, Glycine max
  Clone ID: PAT_MRT3847_99250C.1.pep
LLRLSIKTRVVNKYYVVKPLSQSLQGSHIVVCVHLSHVIRPKACQSLGWDKALPYEVIR

SEQ ID NO: 284855 - protein, 143 aa, Glycine max
  unsure (1)..(143): unsure at all Xaa locations
  Clone ID: PAT_MRT3847_99251C.1.pep
MREYWTSLASVLGVFAFCQTILQAVFPPELRFASVKLFHRVFHCFSTYCYFDITEIDGVNTNELYNAVQLYLSSSVSITGNRLSLTRAVNSSGFTFGLANNDSIVDTFNGVNVLWEHVGDPAQAQTLSWRPLPDEKRVFTLRX

SEQ ID NO: 284856 - protein, 141 aa, Glycine max
  unsure (1)..(141): unsure at all Xaa locations
  Clone ID: PAT_MRT3847_99252C.1.pep
MATTITEQDTSSRAPHVLDYATTTSDEETEQDEEEELVPEENGFGNGVRWFPAASGCGGRRSGGGALGRVLDPRAKWVQEWNRVFLLVCAAGLFVDPLFFYVLSVSDSCMCVFVDGWLAVTVXVLRCMTDALHVWNMVIRS

SEQ ID NO: 284857 - protein, 123 aa, Glycine max
  Clone ID: PAT_MRT3847_99253C.1.pep
DRERPRVRKCNEMPKDAPTLTAAGANPAEDEASLKDLSVQTENKASSASPAPDDPKASDEKTLAEENQKLKELLQKLLASGNDQMGVITDLSEKVKVLERRLARKKRPKVRVHKPSRHASCVH

SEQ ID NO: 284858 - protein, 69 aa, Glycine max
  Clone ID: PAT_MRT3847_99254C.1.pep
KVNHGPYLRLYVQLDEIMSRVPHLRHSARLLGFESQLMYGICGWEESIPAEGNCVSCCGGSMTSVSFMD

SEQ ID NO: 284859 - protein, 197 aa, Glycine max
  Clone ID: PAT_MRT3847_99255C.1.pep
MTKFLDFTDNVSFTKVPTEPGVATTEFLQASDTLVKLFDILGPTAFGAVISDMNGNIKKVRDRQTAFPDQSATLQALVLAEQPEKKKTATEGLLWLLRGLDFTAKALRHNVENPNEELATSFQHSYDGTLKKHHNFVVKGIFSVALKATPYRKDFYEKIGTENSSGKDERLLAWLKNLENVVIILQGFYEENKNFGF

SEQ ID NO: 284860 - protein, 25 aa, Glycine max
  Clone ID: PAT_MRT3847_99256C.1.pep
ARWESKIWSPMVKDRILYGTTLTRL

SEQ ID NO: 284861 - protein, 97 aa, Glycine max
  Clone ID: PAT_MRT3847_99257C.1.pep
WGLWLGGEVATRGNGERHSGINTNSLERIGGEHSIGAGGAHLYRDIAALRRHRSPRISRSLFTETQYMRQNSKCAKLAAWTIFLVFMFRITVVVFSN

SEQ ID NO: 284862 - protein, 140 aa, Glycine max
  Clone ID: PAT_MRT3847_99258C.1.pep
MNEIQILIVAITIHKRLDFGMERVLSVDEISEQYWVAASSSSSSSSSSFKSKMNRSESEWAFQQFLQQEAASSSSNSDHDDDHHHAKLKKESNTNIPVTLHVDSQDYHAILKTKLNLACAAVAMTRVCSFFGTTPCFFFF

SEQ ID NO: 284863 - protein, 41 aa, Glycine max
  Clone ID: PAT_MRT3847_99259C.1.pep
TDEKLQHFVKHFEFISVGHLRITRYSLWLHQLGDYRPPALL

SEQ ID NO: 284864 - protein, 156 aa, Glycine max
  Clone ID: PAT_MRT3847_9925C.1.pep
MAFASFLGRVLFASVFILSAYQEFNEFGVDGGPAAKALRPKFDAFTHRVHSQVGFQLPEIDLKFLIAGAIALKGLGGVLFIFGSSFGALLLLLHQLIATPIHYDFYNYDSEDKEFTQLFIKFTQNMALFGALLFFIGMKNSIPRRVPKKAPKTKTY

SEQ ID NO: 284865 - protein, 81 aa, Glycine max
  unsure (1)..(81): unsure at all Xaa locations
  Clone ID: PAT_MRT3847_99260C.1.pep
MTSSGRMLRSPKHTARPSTTCGGCTMYPGLCYTQSPTTLTLIMGVAPVKAQFPRXLELGVPAKNDGCTCEAYCSHNPCTCK

SEQ ID NO: 284866 - protein, 262 aa, Glycine max
  Clone ID: PAT_MRT3847_99261C.1.pep
MPTKKIKRTTTTTTTKSTKAVKVSGASKKNPLFVSTPKNFRKGGDIQPKRDLSRFVRWPRYIRLQRQRKILYQRLKVPPSINQFSNTLEKNIATDLFKLLLKYQPETKAAKTLRLRNIAAGKEEASAPPAVVKFGLNHVTSLIENKKAKVVVIAHDVDPIELVVFLPALCRQFNIPYCIVKGKARLGQLVHQKNAAVVALTHVNKEDKAKFDSLTEAFRSKFNEDTVNRRKWGGGIMGLKTQKNLELREKAIAAEAAKKAQY

SEQ ID NO: 284867 - protein, 73 aa, Glycine max
  Clone ID: PAT_MRT3847_99262C.1.pep
MKLTTPALLSLVILCHLLLCLPSFTISLIANDADPDTELLLSGDYATGLLNASLARSDDGSLTNMIDRALERE

SEQ ID NO: 284868 - protein, 41 aa, Glycine max
  Clone ID: PAT_MRT3847_99263C.1.pep
FIFIIKNLSYKIIFNIHVYHKGIRLGLSNIYSTLYEVGSPW

SEQ ID NO: 284869 - protein, 195 aa, Glycine max
  Clone ID: PAT_MRT3847_99264C.1.pep
MPSFEVLGGARDRFLPVLPHLSRPYHAFPLLAANRHIETIFASFFRSVPDVRLRRECLRTQDGGAVALDWVSGDDRRLPPDSPLLILLPGLTGGSGDAYVRHMLVRARSKGCRVVVFNSRGCGDSPVTTPQFYSASFLGDMREVVSHVTGRYPNANVYAIGWSLGANILVPYLGQESHNCPLSSAVSLYNPFNLL

SEQ ID NO: 284870 - protein, 40 aa, Glycine max
  unsure (1)..(40): unsure at all Xaa locations
  Clone ID: PAT_MRT3847_99265C.1.pep
YHCHLNFCILVSGQXQFKIGKGXSPKNLADGQIPQHRMML

SEQ ID NO: 284871 - protein, 82 aa, Glycine max
  unsure (1)..(82): unsure at all Xaa locations
  Clone ID: PAT_MRT3847_99266C.1.pep
MTGGMFGRKGQKIKGTVVLMPKNVLDFNAITFVRXGSVNDTVSDFLGICLYSLCHAFDAVTALTGQSICLQLIMATQTDSSG

SEQ ID NO: 284872 - protein, 109 aa, Glycine max
  Clone ID: PAT_MRT3847_99267C.1.pep
RKTPLGSNYADRLSSWVCEFSLAAGASGFSTLKRAVSGTQFMFVSSLIRRPRVCTLYFRLVFGVGMCADNTFSQGTVMALISPPFYVPLYMGKWCAPQAPFQIFGWAPA

SEQ ID NO: 284873 - protein, 97 aa, Glycine max
  unsure (1)..(97): unsure at all Xaa locations
  Clone ID: PAT_MRT3847_99268C.1.pep
MGLARPCLKPQFFQSSIFSLLDPKLRLFLFSTKPLRAVIDMARTGKFFAGGNWKCNGTKDSISKLDADLNNAXFEPXVDVVVAPPFLXIDQVKNLIN

SEQ ID NO: 284874 - protein, 56 aa, Glycine max
  Clone ID: PAT_MRT3847_99269C.1.pep
TLNFPISFLDLPLYLFPSHKFRIHILSPHALRSNPHSFITEVSDVVEVWFLVGYDE

SEQ ID NO: 284875 - protein, 106 aa, Glycine max
  Clone ID: PAT_MRT3847_9926C.1.pep
KLPEVLMVDCSHGNSNKVPRNQPKVAKVIPDQIREGETAIVAVMIESNINEGNQKVPAKGPAGLPKGVSIPYGCIDWDSPVTVLEDLAAAVPERRSKASKKTNGVH

SEQ ID NO: 284876 - protein, 70 aa, Glycine max
  unsure (1)..(70): unsure at all Xaa locations
  Clone ID: PAT_MRT3847_99270C.1.pep
MDTHLYTLEYMNXGHPYKLCDQISDAVLDAXWSKDPESKVACETCTKTNLVMVFGEITTKGNIDYEKIER

SEQ ID NO: 284877 - protein, 45 aa, Glycine max
  Clone ID: PAT_MRT3847_99271C.1.pep
GVVVTTPVLRFCLALSSFRIFRFRCWFAFSISPFICVVHFPLRCV

SEQ ID NO: 284878 - protein, 81 aa, Glycine max
  Clone ID: PAT_MRT3847_99272C.1.pep
MALGTVRHWPLLWMSMTIMAGTTTTYTWSMYHILARRQYSNSRKTLKKLRSMFHHKKPERVVISSQTHLALPGLALLHQLL

SEQ ID NO: 284879 - protein, 42 aa, Glycine max
  Clone ID: PAT_MRT3847_99273C.1.pep
MRGVGCVSLFFTPRAVHKNKSTFNVPYSVLKVMNLYLYFILL

SEQ ID NO: 284880 - protein, 180 aa, Glycine max
  Clone ID: PAT_MRT3847_99274C.1.pep
ILQQNLRSGFLQSGECERDNTLHGCCIIAFRGTHCRFSNLNKSFKYSLRSLLTSCSKEEFYKAFSSFSNIEKELLHRLFLQVITSLHENLEDGFETVCLQTQAGATLDAVEKIVEEQDLDVLFSDRSNIMDVAENLSMAKENEIQHLKHMVQLGEEHNQLLRTLLQLLKEGIQVLSGAYK

SEQ ID NO: 284881 - protein, 189 aa, Glycine max
  Clone ID: PAT_MRT3847_99275C.1.pep
MEKTPKQGSNASLFPSTGIGSRFSNLNKSFKYSLRSLLTSCSKEEFYKAFSSFSNTEKELLHRLFLQVITSLHENLEDGFETVCLQTQAGATLDAVEKIVEEQDLDVLFSDRSNIMDVAENLSMAKKNEIQHLKHMVQLGEEHNQMLRTRLQLLREGNQVLSGASQAVEKFKSMNLNYGANSGDEIHDV

SEQ ID NO: 284882 - protein, 82 aa, Glycine max
  Clone ID: PAT_MRT3847_99276C.1.pep
RKMADKKNNKNIRIHINKKLKGNNGLHSNNRKKKQKTGVKNKKGCQIEKGKKKATLIKNGCQTEKRKSPQPRKKENRQFSNA

SEQ ID NO: 284883 - protein, 36 aa, Glycine max
  Clone ID: PAT_MRT3847_99277C.1.pep
TNILKIKWSCLAFQQVQGFWTCEGGVKLRDASFFCF

SEQ ID NO: 284884 - protein, 57 aa, Glycine max
  Clone ID: PAT_MRT3847_99278C.1.pep
CVRPCVRNFLRNFSFLFKKKKITFPRGNHVGQSQKNSLGKAQSYFVSKTHFLPSQLF

SEQ ID NO: 284885 - protein, 930 aa, Glycine max
  Clone ID: PAT_MRT3847_99279C.1.pep
MWSSFPLVLPLGAALVAGQDITTCPGYSASNVQQNGNGLTADLTLVGEACNAYGTDLPNLTLTVEYQSANRLHVIIQDQNQTVYQVPNEIFPRPESPENSSSEDSDLQFSYTESPFSFAVARSDGETLFNTSGSPLIFESQYLNLRTSLPDSPALYGLGEHSDPFRLNSTNYTRTIWNRDSYGIPAGTNLYGAHPIYVDHRGENGTHGVILLNSNGIQVFIDDTDGQYLEYNILGGVFDFYFVAGPTPIETSQQIAEVVGLPANIPYGGLGFHQCRYGYSDIYEVAGVVYNYSQAEIPLETMWTDIDYMYRRWIMTLDQERFPLEKVRELVTYLHERDQKYTVMVDPAIAYFPDANYSTLDEGIARDVLLKREMGKSLYLGVVWPGPTVFPDWFHPGTQSFWSDQFDSFFNADTGVDIDYLWIDMNEAANFCVYGQCSNLTAATQFAEENNFPPEPPPVRDSSPIALPGFPDDFQPGSNSTNMKRQEAPSGSRMGLPGRNLIDPPYMIQNAAGSLSNKTIDTDLVHYNGLVEYDTHNLYGTMMSNTSVNAMRSRRPDERALVITRSTFLGAGKYVAHWLGDNLSNWNLYRTSIAQMLAFNSIFQIPMVGSDICGFGSNTTETLCARWMMLGAFYPFMRNHNELGAISQEAYRWESVAAASRYAINIRYRMLDYFYTAFYEQTVDGTPSLNPLFYIYPEDANTFGIDTQFFWGGSVLISPVLEENSTSVDIYLPDDVFYDWNDGLSPVRGNGETVTLDDVDFQTIPIHIRGGSILPLRTEGANTTTLLRTKPFEVIVAPSLNGTANGSLYLDDGISLEQTSTTYIQFSWNGSLLSVRGSYDYDTGSTIDGISMLGITSPPRRVTYMGTPLTTTYNETTQVLSITCGIPLNADADVYFDQIQSFTGGSERTGLTSMWLLSGLSAAVAGLVLL

SEQ ID NO: 284886 - protein, 88 aa, Glycine max
  Clone ID: PAT_MRT3847_9927C.1.pep
VEKHERLPVGTVIQVLFFEQTKLHCHIDWSGSFNSLRSPNGGLDPPGRCLSKREMNAQQMEIRKLKEDVYRLQSQFNSMQVQKKKAQC

SEQ ID NO: 284887 - protein, 93 aa, Glycine max
  Clone ID: PAT_MRT3847_99280C.1.pep
RTDPLVRSALNHKTNDYSSQPQNGVWPLCFHRTPYPHSYNPPTFMFFSLPLLVRVPHTQQQTHFHLSCFSYTNNFVFISLYSPRRFFIPIYLK

SEQ ID NO: 284888 - protein, 77 aa, Glycine max
  Clone ID: PAT_MRT3847_99281C.1.pep
LLLKRLRFFFFFVFPNLFPSLSPLFPSIFTANPVNPTMNRKVDCKPPQIASQKWRNFRRLSRASAATEAKSEGGAQD

SEQ ID NO: 284889 - protein, 122 aa, Glycine max
  Clone ID: PAT_MRT3847_99282C.1.pep
KKELYREPVHGFKVKGQETVEYIEKNATNITEEVLSIGKAKDHDLVIVGKQQLETTMLTNIDFRHGNEELGPIGDLFVSSGNGITSSLLVIQDRYFINSNESNLVKTSRAESTVIKDAIEEL

SEQ ID NO: 284890 - protein, 122 aa, Glycine max
  Clone ID: PAT_MRT3847_99283C.1.pep
NSIFKRKIFPARKKGPNPPKGFGPLGFLLGGPPSTGFLVGKRLKNLKTLNFVIKNIPFPKFLHKWPRFFFFSKSPGGPPPFFFLTPNGDFQVATSRGKAFSRVVCPIFYKELPKSSFGPFLP

SEQ ID NO: 284891 - protein, 196 aa, Glycine max
  unsure (1)..(196): unsure at all Xaa locations
  Clone ID: PAT_MRT3847_99284C.1.pep
MINCLGLYPLISAPSTIACTTHIVRSKQYLATQKPVNLALGYRNPHGYGFSFGSRRSIHERVSSHFKGIAVMTDDKSTMSSTEEDLENIGIFHIDPSLKPYKDHFKYRLKRYVDQKKLIEEYEGGLEEFSQGYLKFGFNREEGGIVYCEWAPAAQEAQIIGDFNGWDGSNHQMEKNQFGVWSIXIPDTDGNSAIPH

SEQ ID NO: 284892 - protein, 48 aa, Glycine max
  Clone ID: PAT_MRT3847_99285C.1.pep
KKIIKWCRGNSYNGHQKISSCLLVLRGREKNLNMSISILVSYSSHSEN

SEQ ID NO: 284893 - protein, 70 aa, Glycine max
  Clone ID: PAT_MRT3847_99286C.1.pep
PLYVRPFLPCAAPRTLGAANRERKWALEEIGRRTGSPRGDPRKCSNNGSYQDQILRLGEYPYWRCSYDLF

SEQ ID NO: 284894 - protein, 357 aa, Glycine max
  Clone ID: PAT_MRT3847_99287C.1.pep
MEANCNMINMDDTCELVANNNVGFPTDAANNGIHKPSLLGANKTTLGHHVARRLVEIGIKDVFTVPGDFNLILLDYLVAEPELNLIGCCNELNAGYAADGYARYKGVGACVVTYNVGGLSILNAIAGAYCEDLPIICIVGGPNSNDYGSNKILHHSIGLPDYTQELRCFQPVTCHQVVVNNLDDAHERIDTAIATALRESKPVYISIACNLSAIPHHSFIDQPLPFYLTPKLTSERCLEIAVEITSEFLNKAVKPVMVGGPRLRMAKASDAFMEMVDASGYAFAMLPTAKGMVEESHPNFLGTYWGPASTPFCAEIVESADAYLFAGPIFNDIVSFGFTLPIKKDKAIMVLPNRVMI

SEQ ID NO: 284895 - protein, 122 aa, Glycine max
  Clone ID: PAT_MRT3847_99288C.1.pep
IYGSLLAVGELLRNTGEFMMSRYREVAEIVLRYLEHRDRLVRLSITSLLPRIAHFLRDRFVTNYLTICMDHILSVLKVPQDRDSGFIALGEMAGALDGELIHYLPTITTHLREAIAPRRIKP

SEQ ID NO: 284896 - protein, 56 aa, Glycine max
  Clone ID: PAT_MRT3847_99289C.1.pep
CRNFGLLDLVDHVARTVIEPFTIATIETCERNVGCWQEEDPYSSMRRLYIEVYTQE

SEQ ID NO: 284897 - protein, 105 aa, Glycine max
  Clone ID: PAT_MRT3847_9928C.1.pep
RSQGEAIVLEILKGYQAFTQACGILRAVEPLNSFLASLCKFTINFPVETEKRSALPSPVSKRSELSVDQRDSIVLTPKNVQALRTLFNIAHRLHNVLGPSWVLVC

SEQ ID NO: 284898 - protein, 42 aa, Glycine max
  Clone ID: PAT_MRT3847_99290C.1.pep
RWYLKLIPIHESDVALLQSRNLVINFDRGRISPSVTTSFVVG

SEQ ID NO: 284899 - protein, 59 aa, Glycine max
  Clone ID: PAT_MRT3847_99291C.1.pep
HASAHASAHASAHASALLFWSPSQSASSICIQSLSCNCSCRGSCFYCLDAKSLIMFMVL

SEQ ID NO: 284900 - protein, 153 aa, Glycine max
  unsure (1)..(153): unsure at all Xaa locations
  Clone ID: PAT_MRT3847_99292C.1.pep
ECPVLLEVDSDIKIHQDARKLEGETDCSVLMEIDSDVNEDAKKLVGETECSVLKENDSDMHEDGRKREGETDESVFLKSVAYVHEDVKKIGENETESSVFLEGDSNFSQDNREKVEEEETEESIFIDTYFVEASSLVEEPRILTFTFQXNYIA

SEQ ID NO: 284901 - protein, 547 aa, Glycine max
  unsure (1)..(547): unsure at all Xaa locations
  Clone ID: PAT_MRT3847_99293C.1.pep
MGRQSPGKWIRNLLLGKKSSSKSKSSREKDINKPSSYKDVLVASSEASMSAPTSGANATKGVLSEKEVVSISSNDGVNLSIRDKQDNAQSLANIGSGDHHEKIRQIEAAIIVQAAIRGYQARGTFKTLKGIIPLQSYIRGQLVRRQAISALYCVKSIVKFQXLARGYKVRHSDVGLAVQKIFKDTKLPNLSGGDATTQAAKLSDSIFVNKLLASSPSAVSPNLKYNAGEPNLAWEWLERWTKSHFWVPLREVLKPDSISDKKNGSCQTVETSKRQVKRNARKAPAVRAGDDSVSDSNKHKRYPKKDSNLPLHSAKEHPQKEIEKKSPRKTQIQNVFDKSEVAHEKRTNITRIVSDHATVNDVQEEDADAPSKKLEDSAVSESKQFDVEKSLGQQAEENENNESCNDTNAPLQSSLMNGKDGEFIEDLNDINSKNFQRRASLPANFTDHENLLHSNTPRRPSYMAPTESTKAKLRGHGQGSPRSVSDLADVSSVTRRLSLSSSLNGKYGSFSPRSDRLSALSNKIRTDRSLSSSRDGTDKLMQPKWRR

SEQ ID NO: 284902 - protein, 71 aa, Glycine max
  unsure (1)..(71): unsure at all Xaa locations
  Clone ID: PAT_MRT3847_99294C.1.pep
XXXXPNAXHXKAXXRTXXXQKTEXQQTKTAAMKLSXXKQRKAQHTPKAXQRSEAANGRNSXEDXPNTRQXH

SEQ ID NO: 284903 - protein, 219 aa, Glycine max
  unsure (1)..(219): unsure at all Xaa locations
  Clone ID: PAT_MRT3847_99295C.1.pep
DHFPQYSQAPIAALLPXYLPSMTASVCENPALQPYRLQQAIATGNLPXSPLFFQQSPALSXVQSFVQTIXAQQLQQLVLPAINQVALANLSPYSQQQQFLPFNQLSTLNPAAYLQQQLLPFSQLATAYSQQQQLLPFNQLAALNPAAYLQQQILLPFSQLAAANRASFLTQQQLLPFYQQFAANPATLLQLQQLLPFVQLALTDRAASYQQHIIGGALF

SEQ ID NO: 284904 - protein, 96 aa, Glycine max
  unsure (1)..(96): unsure at all Xaa locations
  Clone ID: PAT_MRT3847_99296C.1.pep
MAEILASKSLLALPARQSSVSGHGLHRSQYYVSWLRAHSLFTKREDEERELLAQDISMDRSPVFERIINTLXFLTEMVRGLTLTLXKYFFETNVTI

SEQ ID NO: 284905 - protein, 75 aa, Glycine max
  unsure (1)..(75): unsure at all Xaa locations
  Clone ID: PAT_MRT3847_99297C.1.pep
VFYFHNRDVPYVNRTDYQFIDIAKEGVDTMLTEDGHTKEELKVXTDERVLTKIKDEEFVSHGQVMCVTATYCGGT

SEQ ID NO: 284906 - protein, 60 aa, Glycine max
  Clone ID: PAT_MRT3847_99298C.1.pep
SGPFPASACDSVKRFILNQVGDGNFNKSPADVRGCWFHFIKMICLSLLVGLKPKVIASCM

SEQ ID NO: 284907 - protein, 97 aa, Glycine max
  unsure (1)..(97): unsure at all Xaa locations
  Clone ID: PAT_MRT3847_99299C.1.pep
MTPYIFXVVVPLLVTLIIRNNSKXKRRRGVPVEVGGEPGLAIRNRRFEAPVQSAWEGVATLAEXFEEACKTHAERLLLGTRGVLQREVETGQDGRSF

SEQ ID NO: 284908 - protein, 108 aa, Glycine max
  Clone ID: PAT_MRT3847_9929C.1.pep
WGGEKFLISNHNVFGQNGALVKGGPPKGSSGGGGGSSLPGFFFLMPSGPPSQFYPPPFVFAFSSLPPPSRPVPRPGDFLGLGDWLPLPLFIFWVGGGNSGGGKTLFFS

SEQ ID NO: 284909 - protein, 76 aa, Glycine max
  Clone ID: PAT_MRT3847_992C.1.pep
EPASSPTMKQNGALNIACSLLKPKAERLDREYPTCYCYQRIISQAQRITKFTTDQVASYITKKSIVSVLLGVPLTP

SEQ ID NO: 284910 - protein, 83 aa, Glycine max
  Clone ID: PAT_MRT3847_99300C.1.pep
LYSDRVTLYTDYYTHSLSTNYSLLTLSTTHHPILPPKTNHFLNEQPHRYFPNSIQIYLKTCSKCHSHTAPIHHPDYSRYGKST

SEQ ID NO: 284911 - protein, 65 aa, Glycine max
  unsure (1)..(65): unsure at all Xaa locations
  Clone ID: PAT_MRT3847_99301C.1.pep
FEFQILQCSVQFQCIASPVIRLTTXCTPVVPCLSPLSPHCFYSIFFTALMPFSSLQLPVHLRGLL

SEQ ID NO: 284912 - protein, 53 aa, Glycine max
  Clone ID: PAT_MRT3847_99302C.1.pep
AAAAKAVAEAETAIAQAEAAAREAEAAEAEAEAAQVFAKAAMKALKCKMLHIW

SEQ ID NO: 284913 - protein, 28 aa, Glycine max
  Clone ID: PAT_MRT3847_99303C.1.pep
YVSILVFFYFLFNRNNLSSFLLFGEFQF

SEQ ID NO: 284914 - protein, 57 aa, Glycine max
  Clone ID: PAT_MRT3847_99304C.1.pep
QVAIGLLARGILVDKTVDWTTLIQNSPIRNLATDADWKTGCLTMDIEMTLTAKVQRS

SEQ ID NO: 284915 - protein, 59 aa, Glycine max
  Clone ID: PAT_MRT3847_99305C.1.pep
TYIQAIHTVKVHVSFFHEVWAQSELLNRNKLSSRLCRGDRINSSILSYKVQCVSAATAS

SEQ ID NO: 284916 - protein, 140 aa, Glycine max
  Clone ID: PAT_MRT3847_99306C.1.pep
FRMAAMQPIHIDPESVKQPKRRNVKISKDPQSVAARHRRERISERIRILQRLVPGGTKMDTASMLDEAIHYVKFLKTQVQSLQRASSANNNIRPLGTSTVNATGIGFPVAMSTTSNSTPYFPLPKPYQARHMENMHDRYD

SEQ ID NO: 284917 - protein, 45 aa, Glycine max
  Clone ID: PAT_MRT3847_99307C.1.pep
KTPERKFFAKDKGNHYFPHSQFNPFYAKNLSLPLNIHVPNGNPPA

SEQ ID NO: 284918 - protein, 217 aa, Glycine max
  unsure (1)..(217): unsure at all Xaa locations
  Clone ID: PAT_MRT3847_99308C.1.pep
TRWWIHEFLFVCCFSGLHDNEDSDGEETESVVSESRVPVGKYHVKESFAPILRSXGDIGASCHLESVVMRSYYVECVCFVVQELQSTPIMQLAKSKIMELMAILKDVESAQLRVAWLRNIVDEIAENIELIDEHCMAEMAKANSDREMETLNKELESNLESLAQKEQEVTDIKTRIEEIREHLSELELKSSDLAKNILSIKSKVDNLDSKSLLDELV

SEQ ID NO: 284919 - protein, 85 aa, Glycine max
  Clone ID: PAT_MRT3847_99309C.1.pep
SLESLLFSRNLLASRNYYWLHFNLSKSTNVLFFFCTMIVLRFGLNLGSHVYFSKLPHACYCWLYFNLSKFTNAFFYFLYNDRIEV

SEQ ID NO: 284920 - protein, 60 aa, Glycine max
  Clone ID: PAT_MRT3847_9930C.1.pep
ERPELKLSSHGRKVQKFGRPVAEIEGLVSTTGLRSLVACSLDTGDRGLIFAFVESWPDAW

SEQ ID NO: 284921 - protein, 91 aa, Glycine max
  Clone ID: PAT_MRT3847_99310C.1.pep
LWWSSTYCIYCSLDIQVEAVMRTNEPLFSSNDYVKQLVECTVPFLSNQGRKGMPHASRGMSDSKSAMDNLRKFQGFDDGNSWSNLLWLILS

SEQ ID NO: 284922 - protein, 51 aa, Glycine max
  Clone ID: PAT_MRT3847_99311C.1.pep
AKCKILGIQRYVVEIIFFLIFLVKSAIFPYFSSKNSFFKIYLSIYIHSVII

SEQ ID NO: 284923 - protein, 50 aa, Glycine max
  unsure (1)..(50): unsure at all Xaa locations
  Clone ID: PAT_MRT3847_99312C.1.pep
MEAYKKWVRQNKEFVHSLXSLANVLTWLLPERVSESKIGPEAITTILGII

SEQ ID NO: 284924 - protein, 61 aa, Glycine max
  Clone ID: PAT_MRT3847_99313C.1.pep
SSLLQLSAPLESLISKKLSNKQPKAYEWFWSKQVPDVVTSFVNKFEGDSCITATSAFYVSP

SEQ ID NO: 284925 - protein, 44 aa, Glycine max
  Clone ID: PAT_MRT3847_99314C.1.pep
LFKGVSEHATHTYKLLLLLLTSILVARSISCPDGHNYRFPPLIH

SEQ ID NO: 284926 - protein, 81 aa, Glycine max
  Clone ID: PAT_MRT3847_99315C.1.pep
TYICDPLPIFLTCNFILLGLFTVHPSLLTIVFLHAIRSVGHDNFTRYAVSLWSPRFSLYGAQCSPLYFSYFTVVLSLLASL

SEQ ID NO: 284927 - protein, 144 aa, Glycine max
  Clone ID: PAT_MRT3847_99316C.1.pep
RIASTSSLVQLEVLTLTTPMFVDGVGAVLSAIDSSVKDGDLEWEFLSQSSWLFLCLMMNISFFTCPSGSGTVSCFSSTFLELSLFSFTSGAVSVSTLGLETVTPLTEGGLFFSSGTATCAVEEADLVAVEEDPFFLLKHAPMEF

SEQ ID NO: 284928 - protein, 217 aa, Glycine max
  Clone ID: PAT_MRT3847_99317C.1.pep
RLEIKWHVSSTTTRNPDPEKLLLLLNISFIYLTFLFLKTYLHPSSSPNIVHASTKIFNHARMLSDISVDGCTDLHKYSDYDSKCLYVKSNVHCRSKGYINYLQIFYCSFGHSPILGHSLLVMWLVVLFYLLADTASNYFCNNLEGLSDILRLSPTIAGVTLLSLGNGAPDFFASVVSFTRSNDGAVGLNSILGGAFFVSSAVLGVISFLVRANEIAI

SEQ ID NO: 284929 - protein, 47 aa, Glycine max
  Clone ID: PAT_MRT3847_99318C.1.pep
GRDLASMSGLEAATFDLGYTLLKAMGVMLATAAIGCVMALYCEHYLW

SEQ ID NO: 284930 - protein, 58 aa, Glycine max
  Clone ID: PAT_MRT3847_99319C.1.pep
IGRKKIQSRMRANRIGVKETECREARAWNTPCLFRLQYFFSGSFCNLHYNIVASFFCW

SEQ ID NO: 284931 - protein, 112 aa, Glycine max
  unsure (1)..(112): unsure at all Xaa locations
  Clone ID: PAT_MRT3847_9931C.1.pep
TAARRRQKGIPSEIFPLETRSAGQSIAVCVNLLCTFVIAQAFLSMLCFFKFGIFLFFSGCVLLMSTFVLFLLPETKNXPIEEMTQSVWKQHWLWKRFIEDDCVKEEKVDTGN

SEQ ID NO: 284932 - protein, 162 aa, Glycine max
  Clone ID: PAT_MRT3847_99320C.1.pep
LGIRLELEPLEPIRLENRLFLISFCVPKLGNYPFLEAYSRPIRCISRSRNTRVSTLVWKRSTALHCHSLSQSSAMDDRSLDLQHSSHEAQANPLMKRFRLGQDKTSVSVKADPTIEQPDEECNSHVRTANQVENGFPTSLDGRSANFIEAEDSPSDSESIGE

SEQ ID NO: 284933 - protein, 59 aa, Glycine max
  unsure (1)..(59): unsure at all Xaa locations
  Clone ID: PAT_MRT3847_99321C.1.pep
WRLLLRCRALSLXASLLFXRGSPILLSGFSAXLLXGPVSGSGPPPGFWSWFFASXVSPS

SEQ ID NO: 284934 - protein, 79 aa, Glycine max
  Clone ID: PAT_MRT3847_99322C.1.pep
SRGKKSFQWGVAAGLDSGFTYGLKKARGVQDWKNGAVGGSIYGAALALKLERSHHEQIGQCGINGSAISFVENFRVGIF

SEQ ID NO: 284935 - protein, 89 aa, Glycine max
  Clone ID: PAT_MRT3847_99323C.1.pep
LKLDPTKPPIFIYPLNSKKLTQNGRTKLQERGIKLPWPFCFPRLLRVPIIGSARPPWVLPPGGGFFPDKPQPGLPPPRPGIGLQEARPP

SEQ ID NO: 284936 - protein, 123 aa, Glycine max
  unsure (1)..(123): unsure at all Xaa locations
  Clone ID: PAT_MRT3847_99324C.1.pep
MRACISIHIGHAGIHVXGSACWELYCXLEHGIHPDGQMPRDKTVRGGDDAFNTFFRETGAGKHVPRAIFGHLDPTVTDEVRTGTYRQLFHPEQLISAKEDAADNFTRGQYTIGKXEIAELCLG

SEQ ID NO: 284937 - protein, 88 aa, Glycine max
  Clone ID: PAT_MRT3847_99325C.1.pep
LLHSNKIVHRNIQPENILLRKLKDGSMQVSLADFGNSSKDAPDLIPIAKNPQYTAPEVFLRANPKEPYDGYKADVWSMGCILTQMLTG

SEQ ID NO: 284938 - protein, 71 aa, Glycine max
  Clone ID: PAT_MRT3847_99326C.1.pep
MGATKQKWTAEEEQALKAGDVKHGVGQWLTILTDTKSRGVLYLRSNAALRDEWTKLNVMSTGWSSTDTCTL

SEQ ID NO: 284939 - protein, 45 aa, Glycine max
  unsure (1)..(45): unsure at all Xaa locations
  Clone ID: PAT_MRT3847_99327C.1.pep
AQIXXRHXKNXXXXSXRXLFFXSXGXXVXXNXRRXXEXERNLASF

SEQ ID NO: 284940 - protein, 186 aa, Glycine max
  Clone ID: PAT_MRT3847_99328C.1.pep
MVDPATELVPPPSSPTNSSISSSDLDTESTGSFFHDRSTTLGTLMGVSFPAITFRASDPHPNSATATATAAAGGPRRAAGSKKKRAIAVAERRRRWWWLCRDGDARPASLGEFLEVERRCGDGAFYGTAAELEGMVMDPQSSHGRALFSDGRVLPPAGVDDDASTAGSLCRRFPVLLTGICSGGAG

SEQ ID NO: 284941 - protein, 84 aa, Glycine max
  Clone ID: PAT_MRT3847_99329C.1.pep
SPNCLDITLIYTATLDYYPFFRTNQHINRDKKLSSIITLGGQHVLAPMGPTLTEPLLENTSSGSLCSPRAHLGEMEQISSPTLL

SEQ ID NO: 284942 - protein, 56 aa, Glycine max
  Clone ID: PAT_MRT3847_9932C.1.pep
FFIDKSQQNNTICGRNYAYENAMKDNVLNLMLIQAPTHYLPQAHHLQYICHRKGSN

SEQ ID NO: 284943 - protein, 46 aa, Glycine max
  Clone ID: PAT_MRT3847_99330C.1.pep
VVFLSSILSPLVLSFAEGRGRLCVRIPGSCPCVAGLKKKKKKRPAP

SEQ ID NO: 284944 - protein, 76 aa, Glycine max
  Clone ID: PAT_MRT3847_99331C.1.pep
VLCIIVCVVCVGVVYRVYPFAMCVGLTIQVCVCVRVFGFKIFVVCRTIHILCLQFQMHHCNNDRTVAMFTARSSRT

SEQ ID NO: 284945 - protein, 98 aa, Glycine max
  Clone ID: PAT_MRT3847_99332C.1.pep
MADLMKRILQMIEAEQASKGSNHGSSNSHNSYGSGSQNGSTINSGNHLNNGNRYDDSYHYGERPIYNSGTFNGNGNGSHIKGGFDSSTRNYYGRRYDY

SEQ ID NO: 284946 - protein, 75 aa, Glycine max
  Clone ID: PAT_MRT3847_99333C.1.pep
KEKPFKKKVWTPLAPTKKKGAFSRGGSFLIAPEASFFMAPPPRFCPVCRPLSLIFVMSRLLSFNPPLCFVYYVSS

SEQ ID NO: 284947 - protein, 66 aa, Glycine max
  Clone ID: PAT_MRT3847_99334C.1.pep
CTKMGKVLVASYMILLSSMSKVPFKKKHIYMLNFFLNCILTQLTAGLVDVFDFDNSPLFFGWVGAK

SEQ ID NO: 284948 - protein, 136 aa, Glycine max
  Clone ID: PAT_MRT3847_99335C.1.pep
IITPFSFSSLSPSMESTPDTQTASLWTDEKHLHYLNTMEASFVRTMLHHYAVVSPLRLDRYLPDTSESTLDSKPKKQATADSMGGSRGRRTKRRSSSKNKVQNSSPAEEQDGSKLEKGIESAACGQGGDDKEPIEN

SEQ ID NO: 284949 - protein, 126 aa, Glycine max
  unsure (1)..(126): unsure at all Xaa locations
  Clone ID: PAT_MRT3847_99336C.1.pep
NFPPQMIYVSVSHVPSFLSAFMDDWIPQLTSPWICHNGNPRIYERNGQQTAIQIICSFCFHDSGMPIAPKLLFAKLILKPDTISNVLKLALIATVFSIVASLKELVSSAKCRLXXSSLSPKXXTAR

SEQ ID NO: 284950 - protein, 107 aa, Glycine max
  unsure (1)..(107): unsure at all Xaa locations
  Clone ID: PAT_MRT3847_99337C.1.pep
AXXXXCXLXXXXXLXSXSXLVCXXLXXXXXXXXXXXXTAXXXFXLXRXXXXXXSXSVLXXSXCXXXXXXXCXXCXXXXXVXRCXXXXXSVXXXRXXXXXXXXXLXXS

SEQ ID NO: 284951 - protein, 71 aa, Glycine max
  Clone ID: PAT_MRT3847_99338C.1.pep
EERIIRKSSIIDQALLLPGGKGGGGVIDHNLNLLGFGKTALNTTHKYNLEKPKGKQALDATTAIKPLPQRL

SEQ ID NO: 284952 - protein, 93 aa, Glycine max
  Clone ID: PAT_MRT3847_99339C.1.pep
NSSSVPGDPLESTCRFFFYTQKHNGIVDFSLQLKLKKQQPKPFIFLLCCFCFLRFCFSFLAPRVLLFTPPLILLVVGCYSFFHRRCRCRYRCE

SEQ ID NO: 284953 - protein, 83 aa, Glycine max
  Clone ID: PAT_MRT3847_9933C.1.pep
KSIRRNIGFNQIEENRSKMYKTSPRQVFHLNSKSQICHKLILQVISHQIKDNVHNHHGSIDLFKVGFVGNFGFGCFGFFFFFF

SEQ ID NO: 284954 - protein, 62 aa, Glycine max
  Clone ID: PAT_MRT3847_99340C.1.pep
APATVELSSVHASSIIHRRWFVIQDNEFGSVHQSYMIIYKQRASASTPWFTCDSIWHRMPGP

SEQ ID NO: 284955 - protein, 96 aa, Glycine max
  unsure (1)..(96): unsure at all Xaa locations
  Clone ID: PAT_MRT3847_99341C.1.pep
RWRAQKQQSSFHKRIGRVQNDAQRFGLHGVKXRIVEAHPLKSRLQSTGRMDEAIERQCKVNLYGSAFPRKEELDRQILSRLERPXGPIPSAMLGFG

SEQ ID NO: 284956 - protein, 60 aa, Glycine max
  unsure (1)..(60): unsure at all Xaa locations
  Clone ID: PAT_MRT3847_99343C.1.pep
KRPKSRSCNLCEKNMKGYGPITFEEALSYKNWRKAMDDEIXCYRRVEVPHRVEVKKLSTI

SEQ ID NO: 284957 - protein, 58 aa, Glycine max
  Clone ID: PAT_MRT3847_99344C.1.pep
IDHLFLPEFWHRVAAMHRTQYGPYVQIRADYVVSACRAPTPGVVNGTSASTISVTWVR

SEQ ID NO: 284958 - protein, 133 aa, Glycine max
  unsure (1)..(133): unsure at all Xaa locations
  Clone ID: PAT_MRT3847_99345C.1.pep
PALVATDSPTYIKLGPNQEIGTLSMLRSRFQSLPGAFNTCLVPFDKKQKGRXLFSKKFAEITASKRNEATKFAQLWNEIICSFHEEDLISDRKGPQIQSQKDVLYNLSSIFITTSILCLLQSMICSLKLFLLI

SEQ ID NO: 284959 - protein, 53 aa, Glycine max
  unsure (1)..(53): unsure at all Xaa locations
  Clone ID: PAT_MRT3847_99346C.1.pep
ACQGAGLXTPPGRILLPLASMRLIMGLSYSEIGSGKLAYHLWASNRRPPLVCL

SEQ ID NO: 284960 - protein, 53 aa, Glycine max
  Clone ID: PAT_MRT3847_99347C.1.pep
ARAQRQAKTEPAIHNTDHPTRQDGAKSRSTAQQTQPRPRQHSSTTARKAQQAR

SEQ ID NO: 284961 - protein, 96 aa, Glycine max
  unsure (1)..(96): unsure at all Xaa locations
  Clone ID: PAT_MRT3847_99348C.1.pep
FLKNEQLLEVIEAFQIXINEGPLMSRGPKCNGTFIQKPLPTEKAIXAAKGFQRIPNWFFNKNLKFWQGMDCPPLFWEGTPYHNAVQKFVAICKLRG

SEQ ID NO: 284962 - protein, 97 aa, Glycine max
  unsure (1)..(97): unsure at all Xaa locations
  Clone ID: PAT_MRT3847_99349C.1.pep
LSELMCPMEGLNFGEASLLSAAXKPHNNLSSWLDVSEDHNQKQFSTLSPTITACGSFSNNGNGRFLREESGVVDDVISPDLAWVNYMHLKKWFVGEL

SEQ ID NO: 284963 - protein, 164 aa, Glycine max
  unsure (1)..(164): unsure at all Xaa locations
  Clone ID: PAT_MRT3847_9934C.1.pep
MALKLPHTFPIFAPSLDPNPNPPRQSSELRFSRWNNPETRSPNARRTPRPTGPAKRSKSPARPKVDRQSHPAFRFSNIPKSKPQRVSGAPENVKISDDGLSYVIDGAPFEFKYSYTETPKVKPIKMREAPFVPFGPDTMPRPWTXRAPLPASKKKLKEFDSFVL

SEQ ID NO: 284964 - protein, 106 aa, Glycine max
  Clone ID: PAT_MRT3847_99350C.1.pep
LQHVFTLGVNPHHKSHHEPLFLSSSSSSSSDVAYNLHQQFIHPCEIWGNDIINNNPIFCSQKSPISIIGKTSTSSDGWRIKSIELFLIVILRNIKPRRQIVVMMRL

SEQ ID NO: 284965 - protein, 336 aa, Glycine max
  Clone ID: PAT_MRT3847_99351C.1.pep
MSSVFSEHKFQLQPSHQLLSLKKSLRDIDIPVPPRKLLTRRSAAVHDVSGDMFSDDTLRHKYLPHNGSTDSSDDDSGDPYASDQFRMFEFKVRRCTRSRSHDWTDCPFVHPGEKARRRDPRRFHYSATVCPEFRRGQCDRGDACEFSHGVFECWLHPSRYRTEACKDGRNCKRKVCFFAHTPRQLRVLHSNENNEKKKCTDMSPHNNNNNTNNCCLVCHCSNSTRSPTSTLFGMSHFSPPLSPPSPSSPSRFETNHHHGVVKYNKDVFSELVCSMEGLNFDEASSLLSAASKPHHHNNLSSWLDVSKDHNQKQFNTLNHQPSLLVEAFPIMEMGDF

SEQ ID NO: 284966 - protein, 228 aa, Glycine max
  unsure (1)..(228): unsure at all Xaa locations
  Clone ID: PAT_MRT3847_99352C.1.pep
MVQWQGDADEGIDYMFKIVMVGDSGVGKSQLLNRFVKNEFHMKSKPTIGVEFLTRTVVMDHKLVKAQIWDTAGQERYQAITTAYYRGATGALLAYDITKQQTFDHVEKWLDELRIHTDKNILVMLXGNKSDLSSLRAVPTEVARDFAQQEGLFFLETSALDSSNVESAFIGLLSQVYRTVSRKLILVDGHESNWDKVNLELEGTKIKVPSQEPECQNAKKRFNCCSIL

SEQ ID NO: 284967 - protein, 81 aa, Glycine max
  Clone ID: PAT_MRT3847_99353C.1.pep
MAQWQGNADEGIDYMFKIVMTGDSGVGKSQLLNRFVKNEFHMKSKPTIGVEFLTRTGVMDHKLVKAQIWDTAGQERYQAIT

SEQ ID NO: 284968 - protein, 50 aa, Glycine max
  Clone ID: PAT_MRT3847_99354C.1.pep
YFCFLCWRKTVLWGGNLIWFFIHYTLRFFKKEDKNLILNISNCTLYKLTR

SEQ ID NO: 284969 - protein, 153 aa, Glycine max
  unsure (1)..(153): unsure at all Xaa locations
  Clone ID: PAT_MRT3847_99355C.1.pep
AIQFVSGCPTALKCGMIHQPPTVVPGGDLAKAQRAVCIPSNPPSVSILFCWIAHKFGLPYGEXAIHHWSVVSCMYTGEFPQAPEDLAAPLHVPYEGGSESGHGGQDSAPANAAQSLPVFVCFVLRLSSSAGLVWFLTDDCNQMYVVGKTQQFR

SEQ ID NO: 284970 - protein, 88 aa, Glycine max
  Clone ID: PAT_MRT3847_99356C.1.pep
PRVRCLIIDIKDESFGGMPMIYLTHTTHQLSYRSVVLQRCGLILHCWCVKCSCFLALNEPSTLVWPLLSVLSCSKEDRLIAHDCISCR

SEQ ID NO: 284971 - protein, 46 aa, Glycine max
  Clone ID: PAT_MRT3847_99357C.1.pep
MFDVGVPAMVRKVFHEARHCSPSIVFIDEIDAICLARLFSFSGSND

SEQ ID NO: 284972 - protein, 101 aa, Glycine max
  unsure (1)..(101): unsure at all Xaa locations
  Clone ID: PAT_MRT3847_99358C.1.pep
LPVKDHRYHGDPFGEEEDNPFSEPAVRGKAYSQASYSGGAXYTTNAGRVATATNSRVCPLNPEPDDYNYGYGATDDIPIDPXTDLKKKEKELQAKEAELRK

SEQ ID NO: 284973 - protein, 42 aa, Glycine max
  unsure (1)..(42): unsure at all Xaa locations
  Clone ID: PAT_MRT3847_99359C.1.pep
XRSLDSVVHAYAIAQQGQMHCRSSAFWCRLPLNWWILEILES

SEQ ID NO: 284974 - protein, 103 aa, Glycine max
  Clone ID: PAT_MRT3847_9935C.1.pep
LKLSPFSQCFMVGGFFGPPQHFQILKRGFPHKKNLDSQFCFGTRGVGKHFGWPNPRFIRKGGSLLEVPYLGFPMGKAGPFFFFFFWGVGKKLTGPLRKKAHLF

SEQ ID NO: 284975 - protein, 45 aa, Glycine max
  Clone ID: PAT_MRT3847_99360C.1.pep
GNIFLLLLGASLNKIFSSFYVIIALLLIFHIPIIISFIPDDFIGR

SEQ ID NO: 284976 - protein, 70 aa, Glycine max
  Clone ID: PAT_MRT3847_99361C.1.pep
NFFLFNPHFHFKIFCPPNPNLKKHQTTPKITNIISHLFSKYKKFYFSSLTLNLIKSNFTANFYNKPPQKS

SEQ ID NO: 284977 - protein, 79 aa, Glycine max
  Clone ID: PAT_MRT3847_99362C.1.pep
NQTNLSTKNPMPSQTLTSIQIVCSHFNLQVIAQFVGEYKVVDVIDLWISTLKVVYLPVLVGAFLSQYVQSIVKFGMQFR

SEQ ID NO: 284978 - protein, 78 aa, Glycine max
  Clone ID: PAT_MRT3847_99363C.1.pep
LPLCLFWLPRPVLLSCLSFFCPSVPVVVFRASCLAFRRLVRSSCSPSSSSCVVCSPGFVPLACACPLPRRFVGVSPCV

SEQ ID NO: 284979 - protein, 49 aa, Glycine max
  Clone ID: PAT_MRT3847_99364C.1.pep
SQLEVKKAFLNRLIKEEVYVGQIPAFESCIYPHHVLKVNKALYGLKDCH

SEQ ID NO: 284980 - protein, 85 aa, Glycine max
  unsure (1)..(85): unsure at all Xaa locations
  Clone ID: PAT_MRT3847_99365C.1.pep
KHAKSPELVXEFLLDAASVIFKEQVEKAFREGTARQNAHSIFVCLALKLLEERVHVACKEIITLEKQVFIMLLLGTDFWNKMNKN

SEQ ID NO: 284981 - protein, 56 aa, Glycine max
  Clone ID: PAT_MRT3847_99366C.1.pep
YVQPKGILFVGLNLKVKPAFVFTVVEPPNSNQVIAQGKVPFFFFLKGGGPNFLFIC

SEQ ID NO: 284982 - protein, 369 aa, Glycine max
  Clone ID: PAT_MRT3847_99367C.1.pep
MLSVRDFWRRHRRKVFVTVGVLGSGYLLYKLYGAQRHGVQELERELAVQRETEDLMKAQMQAHFENIQKMSDVTLPHAMHELSCRITEELDLSHLLERLIQGKGQPNTLTQSEKLDLWSRLKILSFTRMTLSVWATTMLSLYTKVQVNILGRHLYIDTARSLGISDSVESGDVVDREDQKKFLDNIDFLSQHGMPALISDMEAATKEVLKGKQLSTFFNSTTLHETIMQILNSFMSMGTPNSWIKYMIPEDVRPYSTTYGSDDPVPFDMTEFEQLMMEAWAVLSSAEFGSIVEISLKAVVDTLVELMGTKFSGGSVAGGLPLARVLPQVAQMCPLLLEEPRKNQFIQIIKNIQEVELFFTLLYANMPHA

SEQ ID NO: 284983 - protein, 165 aa, Glycine max
  unsure (1)..(165): unsure at all Xaa locations
  Clone ID: PAT_MRT3847_99368C.1.pep
PRVRRLLDRRKRWEXGVDAAFGVGYLHSKNIVHFDLKCDNLLVNLRGPQRPICEGGDFGLSRVKGDTLVSGGVRGTLPWVGPELWNGNSXXGSEKGEVFSFGISMGELLTGEEPYAEMHCGAIIGGVVKNTLXPHVPERGDSEWGKLMEECWAPDPERRASFTGI

SEQ ID NO: 284984 - protein, 43 aa, Glycine max
  Clone ID: PAT_MRT3847_99369C.1.pep
DKRVVRDLAASTGDRFCQIIVCLEGTSFGDCFLHAHLSQLWGC

SEQ ID NO: 284985 - protein, 51 aa, Glycine max
  Clone ID: PAT_MRT3847_9936C.1.pep
RCLTSYLIPIPLHKIHVLTQSCLISLILKRSFALCNTCCSKGSAYINYTLL

SEQ ID NO: 284986 - protein, 74 aa, Glycine max
  Clone ID: PAT_MRT3847_99370C.1.pep
ASLANTHPLLCLGQLAQLSLVASQVPTASYQPHCFWVILIRTNSPWSTLAAPSLALHSNYADLPRYTSVYHSAE

SEQ ID NO: 284987 - protein, 106 aa, Glycine max
  Clone ID: PAT_MRT3847_99371C.1.pep
GGGGGKPRAKFLAVLIWALMAISILKPGVLVVIEQGGHLFATRTNFGRGGVKRSQCPYQGSGGCSRPQSHRPSLFFCQKGCRKCLFVPPGFFGIKAGGPCSTTWKP

SEQ ID NO: 284988 - protein, 81 aa, Glycine max
  Clone ID: PAT_MRT3847_99372C.1.pep
ILHLSPQGQSCCNFWLVFLRHVSLHQPTLHTSPALSLKITPIPTSFPSFTEASKLALAFRACSFEGKRVEMHSKMRCDLHI

SEQ ID NO: 284989 - protein, 67 aa, Glycine max
  Clone ID: PAT_MRT3847_99373C.1.pep
QHDASPLRKLISMRHCIHFSDTDLAGETESSHLYADRSIAISIQDLRNVTCSSAAHIELRHGVWGTD

SEQ ID NO: 284990 - protein, 58 aa, Glycine max
  Clone ID: PAT_MRT3847_99374C.1.pep
FLRSTQLTRTAACPYLFTFFFFLLKRHHLYMKEEPKLRAMRDAPDTHKVVNQRVVYHP

SEQ ID NO: 284991 - protein, 56 aa, Glycine max
  Clone ID: PAT_MRT3847_99375C.1.pep
SIRLECLQDPLSSNIVRDSMTYVATFQARVKAVIRSVDATFWSGYIGCLLLKVCFI

SEQ ID NO: 284992 - protein, 60 aa, Glycine max
  Clone ID: PAT_MRT3847_99376C.1.pep
HIELGISSISPSFTDEVSATFRHGPSLDSTSSNPSRETQVLGLHPHTITPPHVVFSHPSI

SEQ ID NO: 284993 - protein, 229 aa, Glycine max
  Clone ID: PAT_MRT3847_99377C.1.pep
FHLHLLVFDIETEQEPQTFVLRILAMGSNGLRYEIEQNAYIKLVLHSLKHPTSAVNGVLIGRISASNDVVEIADAVPLFHSHIPLLPQLEISLIMIEEYFSAKGLNIVGYFHANERSDDNELGGVAKNIGDHICRYFPEAAVLLLDNKKLDALKKSKDRSAIMQLYVRDTSKNWKLVQSDGNNRFSLKEPSANLVLLDYIASEKWNDIVDFDDHLDDISKDWVNPGLFN

SEQ ID NO: 284994 - protein, 105 aa, Glycine max
  Clone ID: PAT_MRT3847_99378C.1.pep
TNEPFTRPIASPASPHPAILKRVDKERRAVGLAFRDLAPLLGRPRARLAQLGLLLVLVLEVKRHEASEADRHEAVRNVDTVALVVSRRLGRPAQERADDTARVTD

SEQ ID NO: 284995 - protein, 53 aa, Glycine max
  Clone ID: PAT_MRT3847_99379C.1.pep
GSFLRGGAPLFFIFFYLFFSYIFFFFFFLIYFLLVFFFFLFFFFFIFKHTHCT

SEQ ID NO: 284996 - protein, 63 aa, Glycine max
  Clone ID: PAT_MRT3847_9937C.1.pep
SLSRHVEYASQRSCNDIREPSLLTMSLEFSRLSRPSGNQRSRLGRLSHSLRFLETEREEMEME

SEQ ID NO: 284997 - protein, 108 aa, Glycine max
  Clone ID: PAT_MRT3847_99380C.1.pep
MFLKQTSVGGGGNKKRVTGTWTFRFPKDPKFSPVRFLQQLGAKVASAIRVVSMRRRSSRKVSSSSLVRTRSVSDPPDSHRAKAVEDCIEFLHSSSSRERPSSVSESSL

SEQ ID NO: 284998 - protein, 121 aa, Glycine max
  unsure (1)..(121): unsure at all Xaa locations
  Clone ID: PAT_MRT3847_99381C.1.pep
MERYLWNGYVQLLHKPINVIAHATSYGEESDIYNDDIVRGITVKGMAWNIIQKLPVQQFNSSKMFKLYNDSCCSICFQDFEYEEFVRTLPKCGHFFHXLCIDKWLVQQGSCPMCRIFVSDL

SEQ ID NO: 284999 - protein, 84 aa, Glycine max
  unsure (1)..(84): unsure at all Xaa locations
  Clone ID: PAT_MRT3847_99382C.1.pep
CFHYFLDPSKSKLLDWRKRYSIIEGIARGLLYMHRDSRLRIIHRXKTSNILLDEELNPKISDFGMVRIFGGSEDQANTNMVVGT

SEQ ID NO: 285000 - protein, 67 aa, Glycine max
  Clone ID: PAT_MRT3847_99383C.1.pep
NLIVLVGIHSELCLKSCSHGLITGDPHDSCTESCEPNIAFHDCTHLPTMLTLGLYIYYSTKDGSLAL

SEQ ID NO: 285001 - protein, 97 aa, Glycine max
  Clone ID: PAT_MRT3847_99384C.1.pep
VKSPLEKKGKKSELSKKKKHFWINPLRKRDLSKRPAFLARQNTHRGPQRFCVSDTCIYGGALRLSLETFSNTQFLEILICHTTFCNPFCSWKALIET

SEQ ID NO: 285002 - protein, 74 aa, Glycine max
  Clone ID: PAT_MRT3847_99385C.1.pep
AIKEVPKKREMRYGDLRKPDKGLRRHFHDEITVVVLYLGPSKESQNGRSRGKGVYDCIKTPIDIFSVSSGEADL

SEQ ID NO: 285003 - protein, 56 aa, Glycine max
  Clone ID: PAT_MRT3847_99386C.1.pep
WDIPVKIDHRMLLYEYIPSAITYKHLLYKEVSTMARSQRLKKAQHADRGFQKNIWC

SEQ ID NO: 285004 - protein, 50 aa, Glycine max
  Clone ID: PAT_MRT3847_99387C.1.pep
LKIGNKDLLYLLLNWTCHSARGPYYELESYLFITKPVNQTNCIPGANLDH

SEQ ID NO: 285005 - protein, 39 aa, Glycine max
  Clone ID: PAT_MRT3847_99388C.1.pep
LIIQEKTTEFLNRSLWTLLVCEMMLDKMENTKWILHYDS

SEQ ID NO: 285006 - protein, 60 aa, Glycine max
  Clone ID: PAT_MRT3847_99389C.1.pep
MATPPNDAASTKKPQPIPWTHQETVHLIRAYQEKWYALKRGPLRHNQWEEVAVVDAERCG

SEQ ID NO: 285007 - protein, 128 aa, Glycine max
  unsure (1)..(128): unsure at all Xaa locations
  Clone ID: PAT_MRT3847_9938C.1.pep
TFSHLLESTSVQFVGCSYFQMKLCSHNVLIYIXKPCLTYVVSTTRACPYDGYLVTEADSKPLTESNKALAETIGKFAVHCLYHRSGCTWQGTLSECTSHXSGMCFWQFSCCLNRCGDQIVHGQYKTCT

SEQ ID NO: 285008 - protein, 173 aa, Glycine max
  Clone ID: PAT_MRT3847_99390C.1.pep
SQRPRLKRPVLFSWHPKGLLRGLTLNQAMINESTDTVVQMHKPRTEVARTTVRRPVDEHTLNTGNTRITKNKLAFVIYVKRTAIIVTTRTRIMIVVVDKINVRTVYVTKNTIIVEITAIIMVELEAALRTAPMMLLMTGLKKKSNKNSSTTRTTATHKLQVHGTLVHSLAIDR

SEQ ID NO: 285009 - protein, 44 aa, Glycine max
  Clone ID: PAT_MRT3847_99391C.1.pep
KMISHSQVYTITHTLCTGINYTNTSLTRLPLTAWSKISELSRHK

SEQ ID NO: 285010 - protein, 104 aa, Glycine max
  Clone ID: PAT_MRT3847_99392C.1.pep
FNHRSIIRQESDFGIQNPITLTNAATILFYFPFNELIKSHLFIFGAKTKCQQTSTFLLFSSPSSHIISLFVSSFLHFYFFTNQNRKDLSQPLLQSQGRLVGFSL

SEQ ID NO: 285011 - protein, 118 aa, Glycine max
  Clone ID: PAT_MRT3847_99393C.1.pep
FFFFFFFFFFFFFFFFFFFFFFFFSKISKNFFLKKKIKKMGDVEIVTQKPGGHRGIRKRTVKGHKNPIREVFKKKGENLGEIFSCGKPGGPGNSTKHTTRKEKGKTRGAPRGGITQIK

SEQ ID NO: 285012 - protein, 106 aa, Glycine max
  Clone ID: PAT_MRT3847_99394C.1.pep
NPNCRASTRRMPQQLEGTPPLARGNRAYHLIQESPNKHKNRHPSPEGDGQSPQPSHRRQKSPWKLLTRDKRQRAEQAVAHQSWGARKPLISRRRASDSPAGGATAG

SEQ ID NO: 285013 - protein, 124 aa, Glycine max
  Clone ID: PAT_MRT3847_99395C.1.pep
MANKFHVRSNSFPTGSHPSTITVEEELSKLKTWEATSTSTSKSIFVGLSLLQDLHIRLEDLLNMGSTQKLISNHQGEKCMEELLDGSVRILDICGITRDTMLQIKENVQALHSALRRKKGGFKH

SEQ ID NO: 285014 - protein, 151 aa, Glycine max
  Clone ID: PAT_MRT3847_99396C.1.pep
EKNLENPPLSHFFFFRTPTRRGYFFPIRPPPFKGGGGFCPPEGKKGPSFDFSKGLTGGKSTPKNGIFFPITRGKAEKRPGAPLGYPDPGWAPLTWGGEEQWEPPPPGAIWAKSYPTNWVAGPKSPKKRSPFPPLGGAKLFGHPPPHSGLFK

SEQ ID NO: 285015 - protein, 52 aa, Glycine max
  Clone ID: PAT_MRT3847_99397C.1.pep
TEHPIVLEFSQINLSITRNRIFLLPNHFILTLLFSIQILHECFQSIFDLSFV

SEQ ID NO: 285016 - protein, 73 aa, Glycine max
  Clone ID: PAT_MRT3847_99398C.1.pep
CISAFELATNLASIISFKAAPPRIILVKLTKQLSDYAFTCSSNNTLRAVTSSPLVPSTSRLSCHLTSCYLTVA

SEQ ID NO: 285017 - protein, 78 aa, Glycine max
  Clone ID: PAT_MRT3847_99399C.1.pep
GFSYAYKHSSRIIWCRLVNRGCGRAPAPRTSSTNPKLLKRTLHANLMNGILSHLGLFGRVSLPADPWGAAQRFACPWA

SEQ ID NO: 285018 - protein, 215 aa, Glycine max
  Clone ID: PAT_MRT3847_9939C.1.pep
MMSGLQSSNILLDKDFEPHLADFGIAKSLCPSKTHTSTYIMGTIGYIDPEYARTSRLTEKSDVYSYGIVLLELLTGRKAVDNESNLHHLILSKTANDGVMETVDPDITTTCRDMGAVKKVFQLALLCTKKQPVDRPTMNSATGVLGSLVPSITLPKQTDSTQVLLPDSQSSAKMQCYKDEYANLKTPHLVNCPSMSTSDAQLFLKFGEVISQNSH

SEQ ID NO: 285019 - protein, 116 aa, Glycine max
  unsure (1)..(116): unsure at all Xaa locations
  Clone ID: PAT_MRT3847_993C.1.pep
SWXASLVFPGRLCRFWWGAFCGACLALVLRCLRGLVVVGLGLLPGSFAFRGCVFRCLVCLPCLXSCFLWXVLFVFAVXXLVGFPPAPSFAFPVVCWAAAVLLRRRPGRLVPGRSCR

SEQ ID NO: 285020 - protein, 100 aa, Glycine max
  Clone ID: PAT_MRT3847_99400C.1.pep
ELKARYGGTYVFAMTTSIDHENDVENLVRQLFPNASKIYHISGTQKFELPKDEVKIANVFQAVETAKRSFTVSAWGLADTTLEDVFIKVARGAQAFNPLS

SEQ ID NO: 285021 - protein, 56 aa, Glycine max
  Clone ID: PAT_MRT3847_99401C.1.pep
LVFSGTKNIINLISFFSFILSFWCRERERGLDIEVLNMLVYDMVLAGGFLYSPSFL

SEQ ID NO: 285022 - protein, 344 aa, Glycine max
  unsure (1)..(344): unsure at all Xaa locations
  Clone ID: PAT_MRT3847_99402C.1.pep
MPHSSWRTPSIQRQKSKVFVQIEKPDVTQEREKXVEQLLLEPTINQAIVCDNMRKVYPGRDGNPEKLAVRGLSLALPQGECFGMLGPNGAGKTSFINMMIGLTKPTSGTAYVQGLDLRTHMDGIYTSMGVCPQHDXLAVEESLKSVNLFHGXVADKQAGKYSGGMKRRLSVAISLIGDPKVVYMDEPSTGLDPASRKNLWNVVKRAKQDRAIILTTHSMEEAEVLCDRLGIFVDGGLQCIGNPKELKARYGGTYVFTMTTSMDHEKDVENLVRQLSPNANKIYHISGTQKFELPKDEVKIANVFQAVETAKRSFTVSAWGLADTTLEDVFIKVARGAQAFDTLS

SEQ ID NO: 285023 - protein, 168 aa, Glycine max
  unsure (1)..(168): unsure at all Xaa locations
  Clone ID: PAT_MRT3847_99403C.1.pep
RPTKPTSGTAFVQGLDIRTHMDGIYTSMGVCPQHDLLWESLTGREHLLFYGRLKNLKGSALTQAVEESLKSVNLFNGGVADKQAGKYSGGMKRRLSVAISLIGDPKVVYMDEPSTGLDPASRNNLWNVVKRAKQDRAIILTTHSMEEAEVLCDRLGIFVDRGXQCIGN

SEQ ID NO: 285024 - protein, 97 aa, Glycine max
  Clone ID: PAT_MRT3847_99404C.1.pep
SSKRVAPSQARKHLWQKSPSAPEGLNGPRFSSNCFHTTEAPSLPRGLPWLRGPGEQNQTPRFQVLPSASSLFPGGVLKLVKNPFFFPHERGAFFHFF

SEQ ID NO: 285025 - protein, 43 aa, Glycine max
  Clone ID: PAT_MRT3847_99405C.1.pep
KQIFDTFESQNAEYSVKVTFLELYNEEITDLLAPEEIRTYSVS

SEQ ID NO: 285026 - protein, 60 aa, Glycine max
  Clone ID: PAT_MRT3847_99406C.1.pep
SFIIKLSSNLNHKTLYSPNQFLSLADATIHCKTTQKPKPQKNYNMPAVLITPANVTDYDA

SEQ ID NO: 285027 - protein, 414 aa, Glycine max
  Clone ID: PAT_MRT3847_99407C.1.pep
MWRTTLDSSTMRALRLRSFLFSSSSSSSSSCCSLINIFCPSSSSSSFTTLTTIISHSFLPFPPTTRVLFTDSRRFGSPVPRRFGSPVPRCVSSLPTLDWNDAVSCSEVEVDANAADGGDDGAVDQDTKPSIAVRAFFFSTSVDLKSLVEQNKANFVPPSSRMTNYVVLKFGDICVSKGPGTFLSGRNGCYMVVFQYGSIVLFNVPEHEVDAYLKIVKKHASGLLPEMRKDEYEVREKPALSTWMQGGLDYIMLQYLNIDGIRTIGSVLGQSIALDYYGRQVDGMVAEFTDINREMEATGKFKMQRKKLFQLVGKANSNLADVILKLGLFERSDIAWKDAKYAQIWEYLRDEFELTQRFASLDFKLKFVEHNIRFLQEILQNRKSDFLEWLIIALIGAEILLSLYDIVHRSAMKF

SEQ ID NO: 285028 - protein, 278 aa, Glycine max
  unsure (1)..(278): unsure at all Xaa locations
  Clone ID: PAT_MRT3847_99408C.1.pep
MWRTTLDSSTMRALRLRSFLFSSSSSSSSSCCSLINIFCPSSSSSSFTTLTTIISHSFLPFPPTTRVLFTDSRRFGSPVPRCVSSLPTLDWNDAVSCSEVEVDANAADGGDDGAVDQDTKPSIAVRAFFFSTSVDLKSLVEQNKANFVPPSSRMTNYVVLKFGDICVSKGPGTFLSGRNGCYMVVFQYGSIVLFNVPEHEVDAYLKIVKKHASGLLPEMRKDEYEVSAKTAKRILNAFPTLLHILXQYLSIDGIRTIGSVLGQRLLXYYXRQVDGMVA

SEQ ID NO: 285029 - protein, 141 aa, Glycine max
  unsure (1)..(141): unsure at all Xaa locations
  Clone ID: PAT_MRT3847_99409C.1.pep
DQPEKDHQEKRIKMDTRLKQRTHPQYNEVHAQMEANWSKXGLDDGETPNGCMCDLKXSQSKIALTRNTNGGTLLRTDLFTXVDTKGTTRARVDLPSTHGMNXLRKMEATVGMAENTCISLACAKNRSLRGHSQXDIYTICP

SEQ ID NO: 285030 - protein, 68 aa, Glycine max
  Clone ID: PAT_MRT3847_9940C.1.pep
QPPLHQLYFFAEVPPYPLSVNKTHYWIGFYPNSSSFKNDWCLTLTWHYSLLIKLNFSTWYDRFRFVLT

SEQ ID NO: 285031 - protein, 53 aa, Glycine max
  Clone ID: PAT_MRT3847_99410C.1.pep
TAIAQRLDSSLSGYTKRHDQCLFFVRAASVEECLQAASLHTSDRKKWPMHGVN

SEQ ID NO: 285032 - protein, 111 aa, Glycine max
  unsure (1)..(111): unsure at all Xaa locations
  Clone ID: PAT_MRT3847_99411C.1.pep
MEGSILERLDSGKMGYGCKHYRRRCRIRAPCCNELYFCRHCHNEATSMLSNPFDRHELIRQDVQHVACTVCDTEQPVAQVCTNCGVRMGEYFXCRICNFFADDTGKHQFYC

SEQ ID NO: 285033 - protein, 283 aa, Glycine max
  Clone ID: PAT_MRT3847_99412C.1.pep
MEASWKLESLACIDSTALSHSELLALFLSYLCSTHDLLTRNIEPALYNQSPGSLRQTYSLPHSSPIARRRLRLAGLLPSPKLPPLPAHDPENAENRLIIVYLKQFIRDVPIFERVELAPPSLPQPRIQRKRGRNPKVKVHLDDCYRGIDIVNQNGVSVDLQLLANSQDPLAEELKRLIEGLHNENELIGFLSDLPGQWGSRKKKRKIVDSADFGDVLPLSWKILLGLKRKDGRAWIYCRRYISPSGQHFVSCKEVSSYLQTLLGNGDAQLQISRRTEHVLQEH

SEQ ID NO: 285034 - protein, 95 aa, Glycine max
  unsure (1)..(95): unsure at all Xaa locations
  Clone ID: PAT_MRT3847_99413C.1.pep
MSLCGGNRGSGSSRKCGIGCEACKMYPDLSAXESTPPGTLVMAVAPAKVLFEASKMGXVPPGNERCKCGPCCSCTPCASKWGAGTARFTQTTAVL

SEQ ID NO: 285035 - protein, 124 aa, Glycine max
  Clone ID: PAT_MRT3847_99414C.1.pep
MAMASATTPATITVVAISSVASTKRRERNVHFIRGLNSFGGLKAQNSVTSLGLPVCTEQCFAKVVSSLKYQSSSKGRGGGAASSTCNAAGEIFQIAAIMNGLVLVGVAIGFVLLRVEAFVEESE

SEQ ID NO: 285036 - protein, 184 aa, Glycine max
  Clone ID: PAT_MRT3847_99415C.1.pep
PSKRQRVAALSDSSSLLMNQVGLISNVVDPHITAAAADAAVSALCDEDLCPREIFDVEEDYSARALEGEEGLEMERSSLSEIPLTLRVRAATATALGAAAARAKLLADQEDREIEHLVATIIEAQIEKMLRKVKHFDNLELLMEKEHAEMENLKDSILTERIDVLRRTFRSGVTRWKDYSYAKS

SEQ ID NO: 285037 - protein, 228 aa, Glycine max
  Clone ID: PAT_MRT3847_99416C.1.pep
MALAANKVSSSPIVTKRTALCRSHEKHYFSSSTRINRIQLSRHRLEHGHLNYRCLHTQRSTLFNDWFWFFNGKPVGLISKKSSISCKSTGANNTEEKESITTYDDRAHTKDEKNDHTLVVHGLADACRFVCNDAKFLSRGIMRLDARARQDVAFLGTEFLKLDARAREDTEKIDRDVKEKASRLSHIATILKDKAQSRVKNAADEHCSDGALEADLRLADLRARQRAM

SEQ ID NO: 285038 - protein, 57 aa, Glycine max
  Clone ID: PAT_MRT3847_99417C.1.pep
EPIVPFDNCGPRHHCLLHSIAILTTRISFQVIYGRILNKCAPICGYVHSFSTNQNIN

SEQ ID NO: 285039 - protein, 45 aa, Glycine max
  Clone ID: PAT_MRT3847_99418C.1.pep
YYSHPLILFYFIYTWEIVSNQPHVLIITIIPNTMTFINKQMLSQP

SEQ ID NO: 285040 - protein, 86 aa, Glycine max
  Clone ID: PAT_MRT3847_99419C.1.pep
LRQILRTLPLMPPGSRPNMCRKIFNLWGAAPTSFFLGHQNQSSGVVVFSTNSPLLATMEPSGTSQPGHKASGLRVSILNLVFKPRL

SEQ ID NO: 285041 - protein, 43 aa, Glycine max
  Clone ID: PAT_MRT3847_9941C.1.pep
LFLSKHRFLKIKEFQLKYLKFLEFKISQNFKFLYPNTLLGKCQ

SEQ ID NO: 285042 - protein, 52 aa, Glycine max
  unsure (1)..(52): unsure at all Xaa locations
  Clone ID: PAT_MRT3847_99420C.1.pep
YIXRRPQLNTERYIYNKVEEVVKLTNCYYRSHLIINNNKLLLIIHHNQKDRN

SEQ ID NO: 285043 - protein, 201 aa, Glycine max
  Clone ID: PAT_MRT3847_99421C.1.pep
MTKKEIYAKLCLPNRFDGGTKEVWLDKCSGQVCLFMSSKSLKITGIDDRRYWNYIPTEESRFQSVAYLQQMWWVEVVGELEFEFPVGSYSLVFRLQLGKASKRLGRRVCNVDQVHGWDIKPVRFQLSTSDGQSSLSECYLRGPGEWVYYNVGDFVVEKPKEPINIKFSLAQIDCTHTKGGLCVDSAIICPTEFKERTQQSS

SEQ ID NO: 285044 - protein, 73 aa, Glycine max
  Clone ID: PAT_MRT3847_99422C.1.pep
LGSPALFPSTLSSRHTPCQRKQHKLRPPTNSLATKGWTRPFFVLRLSESAPPLSQNQSTLLSRSSPIDLTRLE

SEQ ID NO: 285045 - protein, 228 aa, Glycine max
  Clone ID: PAT_MRT3847_99423C.1.pep
HASVQLETSESQIREAELKGAEFQTQLALAKKSNQEACEELKATKAKKEIVESTLKHTETEVEELISKIRSLEEEIHKERALSTENSIKCGNLEVELSKMKHKVQVQQDTEIKHTEGVNLDLKLKQDLALAASRFAECQKTIASLGQQLKSLATLEDFLLDSDNPMESTCEVTKGHQNGGEHLKPHHSDLSLPKKDSESPVSLNSSITNEKSRNGFGKFIPRSKRGTH

SEQ ID NO: 285046 - protein, 60 aa, Glycine max
  Clone ID: PAT_MRT3847_99424C.1.pep
NPLLQFPVFSTPKNESYSALKSSPSHFFFSVSVFYFLFVPFSPVSDHRHKISFSADSQLN

SEQ ID NO: 285047 - protein, 193 aa, Glycine max
  Clone ID: PAT_MRT3847_99425C.1.pep
MEDAAASAATANVLEAKDGTISVASAFPGHQEAVQDRDHKFLTKAVEEAYKGVECGDGGPFGAVVVLNDEVVVSCHNMVLRNTDPTAHAEVTAIREACQKLNQIELADCEIYASCEPCPMCFGAIHLSRIKRLVYGAKAEAAIAIGFDDFIADALRGTGFYQKAQLEIKKADGSGAVIAEQVFEKTKSKFTLY

SEQ ID NO: 285048 - protein, 99 aa, Glycine max
  Clone ID: PAT_MRT3847_99426C.1.pep
FHSTSYKCYSSIIYTILNIFHAFLYKNQSDSPYVCGVFLNLIKYFSEPKDTLYSYTYPNFNRNTITTNNYTIIHPLQLKFCSSIYVAGFFIINPPTLFN

SEQ ID NO: 285049 - protein, 44 aa, Glycine max
  Clone ID: PAT_MRT3847_99427C.1.pep
SHIVLHLHKPILQETRDIASSSDQSLNHCSTSYPLSRNPRLSFA

SEQ ID NO: 285050 - protein, 68 aa, Glycine max
  Clone ID: PAT_MRT3847_99428C.1.pep
VITIDAVSNLNYYRDVRSFSAAVIRSISLSCYLPITWMPCNNEGANLGISVRYIILEETIFCILPDQK

SEQ ID NO: 285051 - protein, 113 aa, Glycine max
  Clone ID: PAT_MRT3847_99429C.1.pep
GGIEKTLPPPGEGGTASQDPTLKTGTPSSRGKGGCDPGAPPSGESFFFFKPPRFCEHPLFCSQTTGGKKYPSLQKKGAPDLGFFPPYGGGGASPAGEWAFPLRYCLEPPPQAH

SEQ ID NO: 285052 - protein, 110 aa, Glycine max
  Clone ID: PAT_MRT3847_9942C.1.pep
FLKRSQRKECDVSGYVKKVKGGEGLTMEKLRKISYDGVVWWCQDAKNMNGGGDWWCEGNIVNDEIDGFGKIKFFVLALKVEMVDIGGSVYAPQEMVVEGAKKERVVRTRG

SEQ ID NO: 285053 - protein, 77 aa, Glycine max
  Clone ID: PAT_MRT3847_99430C.1.pep
TCQILCHSIYSNRIPLLISISIISNIPRRSMANFICDFEPGNVIQSLLNVSHSAKSLFPEKNLLSGYGSVPARSSFH

SEQ ID NO: 285054 - protein, 47 aa, Glycine max
  Clone ID: PAT_MRT3847_99431C.1.pep
PRVRKKKKKKKKKKKKKKKKKKKKKKKKKKKKKKRTFLNEKNLKKNY

SEQ ID NO: 285055 - protein, 186 aa, Glycine max
  Clone ID: PAT_MRT3847_99432C.1.pep
TCPSSTRSKRHSPLHPPRRTRSADSAKSTSGGLGNEGLPNLTAKDDKTAVTPSHTAATEDKLPELPEKAVFDHDKVTVIFVLGGPGAGKGTQCERMVKDYGFVHLSAGDLLRAEQQRPGSTYGEMIQTYIKEGQIVPMEVTVKLLENAMRDALNQPPSFEPSSPLSSGWQNGRGRFLIDGFPRKMD

SEQ ID NO: 285056 - protein, 79 aa, Glycine max
  unsure (1)..(79): unsure at all Xaa locations
  Clone ID: PAT_MRT3847_99433C.1.pep
SRCGGNRGYRSPCMRGIGYGRXQKFPDLSYPRKTATRTVVMEGSPVKGLYGSAELGLPVKNESCKFLANCTCNLLRCKC

SEQ ID NO: 285057 - protein, 73 aa, Glycine max
  Clone ID: PAT_MRT3847_99434C.1.pep
PYILMIGSQDGIAGNYILKLGCSYPWDETVWPFICLPEMLWILHAVAPLAFIIERKSRPNMTLPGFLQIILLG

SEQ ID NO: 285058 - protein, 68 aa, Glycine max
  Clone ID: PAT_MRT3847_99435C.1.pep
MRSNISYPIKYMQKLKREPQSFHVACSFILISPNNVGNTVFRMSKTKLSQPKVEDTLVLHCHCRTQVL

SEQ ID NO: 285059 - protein, 48 aa, Glycine max
  Clone ID: PAT_MRT3847_99436C.1.pep
VVGCKKREQMSRVDYESLESMVAKALIYLEDGGLVYKAIRECWTEGSE

SEQ ID NO: 285060 - protein, 61 aa, Glycine max
  Clone ID: PAT_MRT3847_99437C.1.pep
MAKFKDPTGRNQSSKGRKNGLKKTKRPPPTSNKRMDPQLLRNHRFPTKHNKKTGPIAPEEE

SEQ ID NO: 285061 - protein, 58 aa, Glycine max
  Clone ID: PAT_MRT3847_99438C.1.pep
IALGGINLLLNINFIPPTTRERKESFYLPPTHPMKFSFFNPSPPFFERKNPDLICKIF

SEQ ID NO: 285062 - protein, 158 aa, Glycine max
  Clone ID: PAT_MRT3847_99439C.1.pep
CNIFGGTPFRKSIESPSAWKSPWFMNTFLSSPRIDTEITIEDFGYFMSPGDRSYDAIGLMKQISEQTAAQYASAQEILGNETPKALPKDASRNDRDEDQEHIDAHNQHGNHCQLASSALVERRVLDFSECGTPVRGDSSKSSAMSFSSPSLYLLKGCR

SEQ ID NO: 285063 - protein, 208 aa, Glycine max
  Clone ID: PAT_MRT3847_9943C.1.pep
ASVSSGTLSTYMPHFTIEPPSNQNNNCSSVPVKSMEKMVGMKRQTPYPFSPDFPHVPAFNCISSPFAEVGTNAKTPCGNGSGFNFGNSTSREVSSSCLASNSEPKSKKRREENENFNGDFLTLAPPSLTLYPPSKVKVILTFQAFHNQGNVEDQIPAPPPVFRLFNQQKQPFYGFFLPEPKEEQIGETAARIQNGHEVGESVDFNLKL

SEQ ID NO: 285064 - protein, 166 aa, Glycine max
  Clone ID: PAT_MRT3847_99440C.1.pep
MPPKFDPSQIVDVFVRVTGGEVGAASSLAPKIGPLGLSPKKIGEDIAKETAKDWKGLRVTVKLTVQNRQAKVTVVPSAAALVIKALKEPERDRKKTKNIKHNGNISLDDVIEIARVMRPRSMAKDLSGSIKEILGTCVSVGCTVDGKDPKDLQQEITDGDVEVPLD

SEQ ID NO: 285065 - protein, 87 aa, Glycine max
  Clone ID: PAT_MRT3847_99441C.1.pep
DCSNETVQPNNMVMIKGGNGNAKRPNMTESTAHAAKEKVVELKKHHKPKQQKQGKKVPSRRRTVEWIKELHASHPDDDDEKALLSNA

SEQ ID NO: 285066 - protein, 30 aa, Glycine max
  unsure (1)..(30): unsure at all Xaa locations
  Clone ID: PAT_MRT3847_99442C.1.pep
KIQIHKPVVINYYSNLQLVYVXVXFTNEEI

SEQ ID NO: 285067 - protein, 105 aa, Glycine max
  Clone ID: PAT_MRT3847_99443C.1.pep
VGDIGKGEVFVPESVVQFGAREAGRDGVQTLKAEDHRIKYDGVHHGSSYLEHLNFLSAIRAKGEKAPSVDLQDGLISVAMGVAAQLSIEYGRFVSIQEVMNECKI

SEQ ID NO: 285068 - protein, 63 aa, Glycine max
  unsure (1)..(63): unsure at all Xaa locations
  Clone ID: PAT_MRT3847_99444C.1.pep
SDEAYSIAFVHLRTNRXAIAKIVEVLLEKEALTGNEFRGQWSGFAEIPVENRVPPSPPEPAPV

SEQ ID NO: 285069 - protein, 142 aa, Glycine max
  Clone ID: PAT_MRT3847_99445C.1.pep
ANLDMQIDPETKEYKAFTELLPLILVLVLIAILLCPLNIVYRSSRMFFLTCLIHCICAPLYKVTLPDFFMADQFTSQVQALRSFEFYICYYGWGDFKQRETSCKSNRIFIAFSFIVAVIPYWSRFLQVQNFIPFSSDVEIFQ

SEQ ID NO: 285070 - protein, 62 aa, Glycine max
  unsure (1)..(62): unsure at all Xaa locations
  Clone ID: PAT_MRT3847_99446C.1.pep
MGLRRHGFSVEEIMTNDELIGXLRSLWEQLNRDVSLTGTKDEPALRVADLKEELDDTRPKLG

SEQ ID NO: 285071 - protein, 146 aa, Glycine max
  Clone ID: PAT_MRT3847_99447C.1.pep
PPIPETPNADGRGPQEEILPVFDIPPEKMGLVFWKKGAPLFSINPSSQPQIFPGGPQGPPPKVFFFGPLKGGGKTRAPIRGGILDIKLKKGFFFFPPTPCQKSFFLSPSFWLKGAGGGCSKLKIPFPPLGFTGKKKKKSFFFTQPE

SEQ ID NO: 285072 - protein, 33 aa, Glycine max
  unsure (1)..(33): unsure at all Xaa locations
  Clone ID: PAT_MRT3847_99448C.1.pep
XTCILTSNVLIXXPSXSYYKXHSYYKIXIKSII

SEQ ID NO: 285073 - protein, 79 aa, Glycine max
  unsure (1)..(79): unsure at all Xaa locations
  Clone ID: PAT_MRT3847_99449C.1.pep
MSCCSGNCSCRSSCKYSNRCXRCKMYPDLSYTESTSTDTLVMGMAPVKAQFEGAEKGVLAENDRCKCRPNCSCNPCTCN

SEQ ID NO: 285074 - protein, 80 aa, Glycine max
  Clone ID: PAT_MRT3847_9944C.1.pep
FLIKSPSLPSRPQQFCQTRSPVISRNRGGGTPHKFLIKSPTSATKVQVQIKNSPPTVSISPTKPARLSRSSSRRSHFYCI

SEQ ID NO: 285075 - protein, 68 aa, Glycine max
  Clone ID: PAT_MRT3847_99450C.1.pep
QIPKSQYQKKQKPVKKIRSKYKQNHHFNHGKWTVILSQVEIFKVFIYTNLLNILKLNSICFFCFFSIS

SEQ ID NO: 285076 - protein, 39 aa, Glycine max
  Clone ID: PAT_MRT3847_99451C.1.pep
SCMHQNIAARKYFKETGSPFCYSLILKVISYKDANMYCS

SEQ ID NO: 285077 - protein, 111 aa, Glycine max
  unsure (1)..(111): unsure at all Xaa locations
  Clone ID: PAT_MRT3847_99452C.1.pep
YHFNGKYHDELMAKAADIGTTEKGIPAANESTWTIGQRLARLHVYNSVSDTGXLTELHLCAPRDQQQHRGGILFEEILYPSTSECNAFVNRTKKAGALPCHHGEKGSEELV

SEQ ID NO: 285078 - protein, 164 aa, Glycine max
  Clone ID: PAT_MRT3847_99453C.1.pep
MSRRPHAAPPPPPRSLHKQQSWSPDMLRDEAWQRRKDNNHPVNRRQHRLSKSLSEDDLDELKACFELGFGFDSPEIDPKLSNTIPALELYHAVNKQYNHHSLSRSSSSSSLVSDSDTTSPTTIFNPGDDLAAKKTRLKQWAQVVACSVWESSSSSCSNPSDQVN

SEQ ID NO: 285079 - protein, 124 aa, Glycine max
  unsure (1)..(124): unsure at all Xaa locations
  Clone ID: PAT_MRT3847_99454C.1.pep
ENKKPPARPAAAQAQGARPGHGASHQKRPRRKKTGHXVCCIKRXKXKXKREERKNTTTRAGKTRPQQSXEPTKDHTKGEQRRADPKTANQQARAHAREREGHHNDTRRPGTDNTAPPNTPHDEK

SEQ ID NO: 285080 - protein, 48 aa, Glycine max
  Clone ID: PAT_MRT3847_99455C.1.pep
HFFFPKAIPSELYVPNEIYCFLKCRMSLSFKFKYMKNVLKLAVLFLLT

SEQ ID NO: 285081 - protein, 117 aa, Glycine max
  unsure (1)..(117): unsure at all Xaa locations
  Clone ID: PAT_MRT3847_99456C.1.pep
RLAAHRVAQHYNMQTIVQNNSLDNQRSKILIKKLPKSKYPIFQLSKIPTKQLENNKSEQKKIIIRTRPNKNNLNNTNEVKIKKNPLISIKXRKEKYNQTQTLIFSNPISSESDNTSS

SEQ ID NO: 285082 - protein, 215 aa, Glycine max
  unsure (1)..(215): unsure at all Xaa locations
  Clone ID: PAT_MRT3847_99457C.1.pep
MSWSSTQEAVVADCEEERNWLDLPRDVVCTIFQKLGAIEILTRAQRVCSVWRGISKEPLLWRTIDMRNSGDIETNFVFLAMCHRAIDYSSGHLLHINIEYFATDDLLHHITHSTSNLRSLRLACCYQISDEGLCEIAEKLPQLEELDISISNLTRDPLEAIGQCCPHLKTLKFNMESYRRPHIECDEEAFAIAETMPHYTIXSFFGNKLTNEGLL

SEQ ID NO: 285083 - protein, 100 aa, Glycine max
  Clone ID: PAT_MRT3847_99458C.1.pep
TTLSLIKSTVSTTTRIESNQPFIPTNTPTSTANMLGRTVFAATFFALAQFAMASPPGCLLGAVNQYEDPSDIKAVCKAKDLSEKVAEICGDDAKDAMAAI

SEQ ID NO: 285084 - protein, 78 aa, Glycine max
  Clone ID: PAT_MRT3847_99459C.1.pep
CLMSYVLLTNEERYYNQEAQVWPPINVNQGEQAQIEGASITGQIIMNDELDFTKKITQDSLDSSKEYVTLLQIMNPST

SEQ ID NO: 285085 - protein, 135 aa, Glycine max
  unsure (1)..(135): unsure at all Xaa locations
  Clone ID: PAT_MRT3847_9945C.1.pep
KAHGGFSVFAGVGERTRXGNDLYREMIESGVIKLDDKQSESKCALVYGQMNEPPGARARVGLTGLTVAEHFRDAEGQHVLLLVNNVLRFTPGDSKVESVPCSKPTTDDTQQDVTTTRGPRTDERRPKTGEGTCVQ

SEQ ID NO: 285086 - protein, 96 aa, Glycine max
  unsure (1)..(96): unsure at all Xaa locations
  Clone ID: PAT_MRT3847_99460C.1.pep
SXLSLSFXLXIFXXSIXXXLXFXFXXXXXSXXXXYSXXXXLXYFXXRXLIXXXSWXXYLXIPXVXXFDXXISXXXYXRXSXXXXXXXYSVXIXFXN

SEQ ID NO: 285087 - protein, 170 aa, Glycine max
  unsure (1)..(170): unsure at all Xaa locations
  Clone ID: PAT_MRT3847_99461C.1.pep
MMEGASNGGMLYHEVQESKLCAVHCVNTVLQGPFFSEFDLAALASDLDRKERQVMLPALASADFESHNVSLDGDFSIQVLQKALEVWDLQVIPLDSPVAEPAQIDPELENAFICHLQDHWFCIRKVNREWYNFDSLYAAPQHLSXFYLSAYLDSLKGGAYSRSPSPHLKL

SEQ ID NO: 285088 - protein, 135 aa, Glycine max
  Clone ID: PAT_MRT3847_99462C.1.pep
KKPIWGPQKGKYNRKSHKGENFGQTETNSFRGKQVSPGTYRKVGDFKGENRSKGALWATGGLGKTPMGTFLGTKGGAGPNDSGFPKRGVKRHGSAKKAPKIWQLGVKPPFSTKKPPQTFFRKSKNLGFLPPPRGE

SEQ ID NO: 285089 - protein, 263 aa, Glycine max
  unsure (1)..(263): unsure at all Xaa locations
  Clone ID: PAT_MRT3847_99463C.1.pep
EFNEVDHLFRHRINSSVLHATNYIKQFPSPIISIIAKFISFVSGGFAAILIIIAFLEESLLEGHIFGRKKSIQIFCRNLFWYAAVFGTITAIRRAAITDELLVIDPEGAMSMVVEHTHYMPKRWRGKESTEMVRIEFETLFQYTGMMLLEEMASIFLTPYLLLCIVPKRVDDILQFIAEFTVNVEGVGHVCSFSAFDFQEHGNSHYGSPCNAPRSRRSSQGKMEKSLLSFQSSYPSWEPSALGKRXLLNLRRFREETLPVHGN

SEQ ID NO: 285090 - protein, 332 aa, Glycine max
  unsure (1)..(332): unsure at all Xaa locations
  Clone ID: PAT_MRT3847_99464C.1.pep
RPKVFCTGSRQLCVVKALSAHDLLLRLXRKEILLIGMLNKGVLXFPLSQWFPGAGPSGKSSSNGTQNRVILTKTLEWTLNWCILQSMFDRNFCVRRDFVSNPKTLRKRLMVVGLAMLLLSPFLVIFMLVYLFLRHAEQFYNHPSTASXRRWSNFKWIFEXHGEVDHLFKHRINSSVLHASNYIKQFPSPIISIIAKFISFVSGGFAAILIIIAFLEESLLEGHIFGRNLFWYAAVFGTITAIRRASITDELLVIDPEGAMSMVVEHTHYMPKRWRGKESTEMVRIEFETLFQYSGMMLLEEMASIFLTPYLLLLVVPKVIAVLDRFPLLLLR

SEQ ID NO: 285091 - protein, 98 aa, Glycine max
  Clone ID: PAT_MRT3847_99465C.1.pep
INMGVVGQNLSIRSIVSSKHNPWARGACSTACPLFLTTLCIIILSLALIPNIEFNQIPIIMCEPSHLCLRMVFVHNSAQVTVARASWNGLSDKIKLSP

SEQ ID NO: 285092 - protein, 135 aa, Glycine max
  Clone ID: PAT_MRT3847_99466C.1.pep
PLHLYHHLKLYPDDEKSSMSTKKPVVVEFYDEIVFPDPSEAFLARVQNHPAVNLPRLPAGLTLPPSIPVEDASKRRKGDTKDHSLSQWFMNFSEADELLQLAAARQQVQAHIAKLRRQISLIDGQHQQFKSSSDL

SEQ ID NO: 285093 - protein, 58 aa, Glycine max
  unsure (1)..(58): unsure at all Xaa locations
  Clone ID: PAT_MRT3847_99467C.1.pep
MAVEGIAVDASSANNGFNGKITLSVVLTCIVAASSGLXXGYDLGITGGVTTMKPFLEN

SEQ ID NO: 285094 - protein, 217 aa, Glycine max
  Clone ID: PAT_MRT3847_99468C.1.pep
YNKQTVALVGESGSGKSTVISLLQRFYDPDSGHITLDGTEIQRMQVKWLRQQMGLVSQEPVLFNDTIRANIAYGKADATEAEIITAAELANAHTFISSLQKGYDTLVGERGVQLSGGQKQRVAIARAIVKSPKILLLDEATSALDAESEKVVQDALDRVMVDRTTIVVAHRLSTIKGADLIAVVKNGVIAEKGKHEALLNKGGDYASLVALHTSAST

SEQ ID NO: 285095 - protein, 207 aa, Glycine max
  Clone ID: PAT_MRT3847_99469C.1.pep
YFLMSAHYRSPINYSNIQLESASDRVFYIYETLHECESFLNQHDQTIRKDSIPPDTLDIIDKFHDVFLTSMSDDLHTPVVLAGMSDPLKSINDLLHTRKGKKQQFRIESLSALEKSIRDVLTVLGLMPASYFEVLQQLKEKALKRANLTEDDVLQKIEERATARMQKEYAKSDAIRKDLAVLGITLMDSPNGTTWRPAIPLPLQELL

SEQ ID NO: 285096 - protein, 58 aa, Glycine max
  unsure (1)..(58): unsure at all Xaa locations
  Clone ID: PAT_MRT3847_9946C.1.pep
MIQGMKRELYTIPIXSRDWTEADTLSAPVDLGHPCTTMPNIIWGFIHIHAAPALMHWR

SEQ ID NO: 285097 - protein, 36 aa, Glycine max
  Clone ID: PAT_MRT3847_99470C.1.pep
IPPPPPPTVPDKTERAMPLTLRDHIFERTFIKNYKI

SEQ ID NO: 285098 - protein, 73 aa, Glycine max
  Clone ID: PAT_MRT3847_99471C.1.pep
PVLARHSFCQNLSVIGKRCCCTYFKWCKQAGIMDFVGTDFVFRIVWQTTRFIQRVRIWFTIKRTESVVLASLN

SEQ ID NO: 285099 - protein, 87 aa, Glycine max
  Clone ID: PAT_MRT3847_99472C.1.pep
PLAPRAIFPSQILIPPSIPPPLCPRLFGLQQVSLLYWYTPFSSGLCYLGSLSPYLLLFIPPPPPPPPPPPPKQGGTCTQCSTANLPA

SEQ ID NO: 285100 - protein, 182 aa, Glycine max
  unsure (1)..(182): unsure at all Xaa locations
  Clone ID: PAT_MRT3847_99473C.1.pep
PLHFDSSKQSFGQFAIDLLGGGILVDKTGDWITLIQNSAISNLVRDAAWKKGCLMVKIGMSGNATLKRSDWALLGPGVLTNKHRSEHFVAXRGQNWKHHSWDWIFPIRXCGLNIGLEKWSSEWANQTSWHWSFLIDNPKQSTVFDILWGISQDFEIAGNTLMPAFSVPQATARSFENXESSA

SEQ ID NO: 285101 - protein, 55 aa, Glycine max
  Clone ID: PAT_MRT3847_99474C.1.pep
IQCSVILQDSLLTLLKTLMHHPQAYVGTKPQLMPVINRHHRRQRRRKSVLYMIVS

SEQ ID NO: 285102 - protein, 137 aa, Glycine max
  unsure (1)..(137): unsure at all Xaa locations
  Clone ID: PAT_MRT3847_99475C.1.pep
VLVVLSVPLNDNLYICDNTRGWAGAITIKYLTGNGSNVILYRHYRHPKGVTPKXYSLKPVVPRLFEIIEIYVQMVNDCIDEEVDIFFAQLPQSGVLLLENDMIYNVDDMNDPHFAXKIACIADLYMTDAFSAVHRAH

SEQ ID NO: 285103 - protein, 46 aa, Glycine max
  unsure (1)..(46): unsure at all Xaa locations
  Clone ID: PAT_MRT3847_99476C.1.pep
PLLEQSTXRYDHFTQRGTAHITSTPYSTYLHSDIIRDTALNPISML

SEQ ID NO: 285104 - protein, 118 aa, Glycine max
  Clone ID: PAT_MRT3847_99477C.1.pep
PPPPPPPPPHTIHKLRQLGLSIITNLNVHRPLIDMSQLLWSNSTDISELPDGLITCIPDATKPLPVNFAKTKPFMKKLIDLHFAGKTLIEHISLCACTKHQIRTFNIVFYIFLKYWRR

SEQ ID NO: 285105 - protein, 51 aa, Glycine max
  Clone ID: PAT_MRT3847_99478C.1.pep
WSRGGAYNSILEYDDSSDPAVIAGGGVCVYFIPVGSPRESVLVIHDLWSTN

SEQ ID NO: 285106 - protein, 56 aa, Glycine max
  Clone ID: PAT_MRT3847_99479C.1.pep
ERGAQDENNILFIHQRKEQITLHMTPQLFHFHRSIKFPTDVNKHYGTLRHALPWFY

SEQ ID NO: 285107 - protein, 64 aa, Glycine max
  unsure (1)..(64): unsure at all Xaa locations
  Clone ID: PAT_MRT3847_9947C.1.pep
MATATNAADAPSRQLCERVAAVQMMLVADVHLRTMICYXQMERYIFKRRNYSIDTFNLVNTREK

SEQ ID NO: 285108 - protein, 42 aa, Glycine max
  Clone ID: PAT_MRT3847_99480C.1.pep
NFQIGQAFLTGRACLIPFIELNKRTCERKHKHRFTPTFPFFH

SEQ ID NO: 285109 - protein, 102 aa, Glycine max
  Clone ID: PAT_MRT3847_99481C.1.pep
VFVGKARSSQPGSFLNIMGDYKTCVSGSALPLSFYLRVTYRMLRLSWCPMYGHTLGRNQNNLNVPTYIWVWNGTLGGTFSHCIRLIFNAPSLNTRLDTTWDY

SEQ ID NO: 285110 - protein, 125 aa, Glycine max
  Clone ID: PAT_MRT3847_99482C.1.pep
LKGHDWEDVAKHVLARANSSKSPKTQTQCKNKIESMKKRYRSESATTADASSWPLYSRLDVLLRGTGLISSSLPPPIAATAIAAPSQSPHATINNNQALVLLEPPSLAVLQAPSVAPPPIAIAQN

SEQ ID NO: 285111 - protein, 37 aa, Glycine max
  Clone ID: PAT_MRT3847_99483C.1.pep
VGCQLGVLPNSGVNIDPGMQVGCRNFHVFAWPSSGQA

SEQ ID NO: 285112 - protein, 133 aa, Glycine max
  Clone ID: PAT_MRT3847_99484C.1.pep
SIILFTIFSLSLCACYPSLDPQQKVVLKVMTMTDDKTKQKAIEAAADIYGVDSIVADVKEQKLTVIGQMDTVKIVKKLKKVGKVDIISVGPAKEEKKEEKKEEKKEEKKEEKKEEKKGEKKEEKKEEKKEEKK

SEQ ID NO: 285113 - protein, 81 aa, Glycine max
  Clone ID: PAT_MRT3847_99485C.1.pep
PVRVSFAVRVGGLWVCAFVPLRVSTLSAPGAVSAVLAALLGVPFVRPASSASGAPLWCPFAGGDRGFFSTRPPPLWCLRAG

SEQ ID NO: 285114 - protein, 72 aa, Glycine max
  unsure (1)..(72): unsure at all Xaa locations
  Clone ID: PAT_MRT3847_99486C.1.pep
KLGFGIPKNKGKGGKTRKPGKNGADAENRNRVSREAGQDYPKVPRIPENGRCKXMCIEGTKRLGNTRGKFHK

SEQ ID NO: 285115 - protein, 136 aa, Glycine max
  Clone ID: PAT_MRT3847_99487C.1.pep
GETDRQRYRDRERERERERLSFLSISLCFLIISSWTQKGLVTEGRKTPTQNGFYQAVHDDKAMVRAQIGSRPPRCERRCRSCGQCEAIQGPTNPQAQNGKINSSTVSTIVFTMGEGSSNYKPMSWKCKCGNRIFNP

SEQ ID NO: 285116 - protein, 391 aa, Glycine max
  Clone ID: PAT_MRT3847_99488C.1.pep
MGRRGIQLFDEKRDVFFSVCNLGFESKDGYHQFGGLFASVGQMGMGVGVQPNDPSDSRNNGGMKFPLNELFLKHVQSQGKEEAVEEGVKGKKNKKGGGVSLKLKIRNPSLRRLFSGAVAGTVSRTAVAPLETIRTLLMVGSSGHSTTEVFDNIMKTDGWKGLFRGNFVNVIRVAPSKAIELFAFVIVHKNLSPKPGEQSKIPIPASLIAGACAGISSTICTYPLELVKTRLTVQSDVYHGLLHAFVKIIREEGPAQLYRGLAASLIGVVPYAATNYYAYDTLRKAYQKFSKQKKVGNIETLLIGSAAGAFSSSATFPLEVARKQMQLGALSGRQVYKDVFHALACIFEQEGIHGLYRGLAPSCMKLVPAAGISFMCYEACKRILLENDEED

SEQ ID NO: 285117 - protein, 123 aa, Glycine max
  unsure (1)..(123): unsure at all Xaa locations
  Clone ID: PAT_MRT3847_99489C.1.pep
MGRRGIQLFDEKIDVFFSVSNLGFESKDGYHQFGGLFASVGQMGMGVGVQPNDPSDSRDNGGMKLPLNELFLKHVQPQGKEEVVEEGAKGKKNRKXGGVSLKLKIRNPSLRRLFSGAVAGAVS

SEQ ID NO: 285118 - protein, 117 aa, Glycine max
  Clone ID: PAT_MRT3847_9948C.1.pep
ASAMFRGKMSTKEVDEQMINVQNKNSSYFVEWIPNNVKSTVCDIPPTGLKMASTFIGNSTSIQEMFRRVSEQFTAMFRRKAFLHWYTGEGMDEMEFTEAESNMNDLVSEYQQYQDAL

SEQ ID NO: 285119 - protein, 107 aa, Glycine max
  unsure (1)..(107): unsure at all Xaa locations
  Clone ID: PAT_MRT3847_99490C.1.pep
MVKITPGNLDESFNPASLKAXFPKFHATLIFVFAGVXFTIALHELTKDAALDPTGLVAVAVAHAFALFVCVSVAANISSGHLNPAVTFGLAIGGNITLITGFLYWIA

SEQ ID NO: 285120 - protein, 106 aa, Glycine max
  Clone ID: PAT_MRT3847_99491C.1.pep
VSTHLDRISLSTCRPINTASMNSNLSVAESSTVSDESDLNGFDGDDMYRLSGPCPLSGNDLCCQVHDAYRPEDSNPWGLLPLLNYSEAPLALIVDGETFNGDMPRE

SEQ ID NO: 285121 - protein, 62 aa, Glycine max
  Clone ID: PAT_MRT3847_99492C.1.pep
KIPGRQKFVIGNFAKTERHPNQLPLQLIVNCFSPYDFDVFVANLGIPAIKMQRIRLFLCNFR

SEQ ID NO: 285122 - protein, 49 aa, Glycine max
  Clone ID: PAT_MRT3847_99493C.1.pep
LDTFSQLHWHHSTGEIWSSPYCFLRWMPNAITRKTLMTAFFIRWPNFQK

SEQ ID NO: 285123 - protein, 104 aa, Glycine max
  Clone ID: PAT_MRT3847_99494C.1.pep
RESLVPNFLGKTSLHKVKVIFFSNSGERAAPFIRQAAKDYWASASFAFILWREEESSYWWGAFGVESAPAIVFLKDPGVKPVVHHGSVNNSFFLNLMENNKQQE

SEQ ID NO: 285124 - protein, 51 aa, Glycine max
  Clone ID: PAT_MRT3847_99495C.1.pep
LSSGHFRINNDHSTIYKKNGVIRQAAQGMEVENPYSKLVAFTAPSVVFSQP

SEQ ID NO: 285125 - protein, 45 aa, Glycine max
  Clone ID: PAT_MRT3847_99496C.1.pep
DASEELFYDYRYGPDQAPPWARKPEGSKRDESTASQGRAKKHQSH

SEQ ID NO: 285126 - protein, 84 aa, Glycine max
  Clone ID: PAT_MRT3847_99497C.1.pep
FFFLLYCFFFFPHHHHFLSIHLFFNKPMICIPHSTQFIFLLELLYQMLSKENLQQILRMPQYGTLDGIHNAASQLLQHSNRTRG

SEQ ID NO: 285127 - protein, 65 aa, Glycine max
  unsure (1)..(65): unsure at all Xaa locations
  Clone ID: PAT_MRT3847_99498C.1.pep
SYLGPTQYTXTTQHEHATLINIADNPIKVHLTILYNYXKYPAFHIIITDNDFSTLYASLIHYARM

SEQ ID NO: 285128 - protein, 448 aa, Glycine max
  unsure (1)..(448): unsure at all Xaa locations
  Clone ID: PAT_MRT3847_9949C.1.pep
MREILHIQGGQCGNQIGAKFWEVVCAEHGIDSTGRYQGDNELQLERVNVYYNEASCGRFVPRAVLMDLEPGTMDSVRSGPYGQIFRPDNFVFGQSGAGNNWAKGHYTEGAELIDSVLDVVRKEAENCDCLQGFQVCHSLGGGTGSGMGTLLISKIREEYPDRMMLTFSVFPSPKVSDTVVEPYNATLSVHQLVENADECMVLDNEALYDICFRTLKLTTPSFGDLNHLISATMSGVTCCLRFPGQLNSDLRKLAVNLIPFPRLHFFMVGFAPLTSRGSQQYRALTVPELTQQMWDAKNIIYAANPHHNHYLTTSAMFRKKISTKKGDEQMINIQNKNSSYFVKXIPNNIKSTIYNIPPTKLKITSTFINNSTSIQEMFRRVSEQFTAMFRRKAFLHWYTGEGMDEMEFTEAESNMNDLVSEYQQYQDATADDEGYEYEDEEEPQEDEA

SEQ ID NO: 285129 - protein, 139 aa, Glycine max
  Clone ID: PAT_MRT3847_994C.1.pep
MEAEMDHYAVLGLPSGEEGAKLTEKEINKAYRWKALELHPDKRPDDPNAAANFQQLRTSYDILRDDKARKLFDDLLRVKRERELRNLQRDGKRRKMVSDLERRERDANAPDPAAKEREEEARIARQLKEEIARIRAMHG

SEQ ID NO: 285130 - protein, 30 aa, Glycine max
  Clone ID: PAT_MRT3847_99500C.1.pep
SSFLLNSELKGDYRSCIFIFLPLRADDWFK

SEQ ID NO: 285131 - protein, 52 aa, Glycine max
  Clone ID: PAT_MRT3847_99502C.1.pep
TTIFNLMITREKRPIRKRAKKCVTKNYLLFSSKNSHFDQIKTKVYFLSSFEK

SEQ ID NO: 285132 - protein, 51 aa, Glycine max
  Clone ID: PAT_MRT3847_99503C.1.pep
FGSRFSWFGIFVVIGNTSLPQTDCYKQGSSGISRQFVRTIIHVMTLAMPLC

SEQ ID NO: 285133 - protein, 199 aa, Glycine max
  Clone ID: PAT_MRT3847_99504C.1.pep
MKMTEEVKHDQQSITKEREEYTSMDNFRGIVVEGNRDDVLAISAAEGEDFHGSVVQGNWDDVIHMCENKGMLCKIMINASRGTALHVAVSEGNEVVVNRLVESMINHNMVEALELKDEKGDTPLHLAASRGLKHICECIIGPNYERKYLITIHNEEGETPLFQAALSWQKQAFMYLSSLMPDDENYSVLNSRNGDSILH

SEQ ID NO: 285134 - protein, 70 aa, Glycine max
  Clone ID: PAT_MRT3847_99505C.1.pep
VGGLCRRRSRSRRSGPRRRRLLWRHRPGPLAMPNGPGLGFSERVEQLLTGSWVGVSAESELQRFFFFFYF

SEQ ID NO: 285135 - protein, 142 aa, Glycine max
  Clone ID: PAT_MRT3847_99506C.1.pep
REVQASGSCNEVHERHAVHHHQQQQQNQHAQQQIATTAFHISSPSLPISTIISPPPLHHASIILDDNSYHVSRIMLQNENFQQQQQQHYKLGGRSASGLEELIMGCTSTDIKAESSIANPQAEWLKYSSYWPDPANMQDHRE

SEQ ID NO: 285136 - protein, 143 aa, Glycine max
  unsure (1)..(143): unsure at all Xaa locations
  Clone ID: PAT_MRT3847_99507C.1.pep
KKRTTRKXAGXRRTSRQXXRTRGTRGTEKKXDRTSKHXXXRGGGQXXQXKXXTXKTPXXXXXTXXNQXRHXGQXXQKHAGKNXKAQPKQXXXPGQNRQSXXAXSRXKKXSXRXXRXKGPTXXRQRGGPPXQHPRRHXXAKSTT

SEQ ID NO: 285137 - protein, 55 aa, Glycine max
  Clone ID: PAT_MRT3847_99508C.1.pep
TPKAASCELTSQERDAALLRYKRNKKTRRFDTHIRYESRKVRAESMVRVNGRLAK

SEQ ID NO: 285138 - protein, 175 aa, Glycine max
  Clone ID: PAT_MRT3847_99509C.1.pep
MQSQVVCNGCRSLLLYPRGATNVCCALCNTITSVPPPGMEMSQLYCGGCRTLLMYTRGATSVRCSCCHTVNLVPPASNQVAHVHCGNCRTTLMYPYGAPSVKCALCHFITNTNNGRLPIPVHRPNGTTNAGTLPSTSTSMPQSQSQTVVVENPMSVDSSGKLVSNVVVGVTTDKK

SEQ ID NO: 285139 - protein, 95 aa, Glycine max
  unsure (1)..(95): unsure at all Xaa locations
  Clone ID: PAT_MRT3847_9950C.1.pep
GPHIGGDKFKAPDCVMYNGTTCPKNHLKMYCPKMGAYGKDXKLLIHLLQESRTGXASTCFTNLKPCRGHCWKDLMVAFVGHFQFNSDMAPVRMHL

SEQ ID NO: 285140 - protein, 51 aa, Glycine max
  Clone ID: PAT_MRT3847_99510C.1.pep
CGRNSISSSEEFVEHCINNAECLTVGVRKRSQGNNGYLISKRWQKKFWLLA

SEQ ID NO: 285141 - protein, 94 aa, Glycine max
  unsure (1)..(94): unsure at all Xaa locations
  Clone ID: PAT_MRT3847_99511C.1.pep
PQQGSPPAQGPQAKHRATQXDKAHAMGHPANGNKRNGKRETERVVSIRSKPKVGEVKQQRYEEEEEMMKGFGKSEREKVREKRRAKWNRNGRGV

SEQ ID NO: 285142 - protein, 125 aa, Glycine max
  unsure (1)..(125): unsure at all Xaa locations
  Clone ID: PAT_MRT3847_99512C.1.pep
QICPNGGPTNLVTFGRVTRDIIDRVYFSNLQVNKGSIHSDQDLFSPPGADPIPIVNRFSSAHKVSFDAIEASMIKMGNISVLAVKKGDIRNPCVFVIXKSVDVDIASEASEDSSTEGMVPSIYMD

SEQ ID NO: 285143 - protein, 67 aa, Glycine max
  Clone ID: PAT_MRT3847_99513C.1.pep
PTTVFNFVPMENNRVEVKFRRIAINQPSCKMQTCTHGFVGAAAEKQKWYREETSQQKHTQNITLCLA

SEQ ID NO: 285144 - protein, 70 aa, Glycine max
  Clone ID: PAT_MRT3847_99514C.1.pep
MGESETGERWNGAMTDLTVMDANFYFLQRLLFTKAVFVDDDTLWTGFVVDYQDRVMKLLDQRVQTLERDG

SEQ ID NO: 285145 - protein, 70 aa, Glycine max
  Clone ID: PAT_MRT3847_99515C.1.pep
LIFIRFKFKFLRERYILVSILKPKLCVLVKLVTGAKEVTGPLFIASYIKLKPTATATRYYLMQYPQEKHA

SEQ ID NO: 285146 - protein, 74 aa, Glycine max
  unsure (1)..(74): unsure at all Xaa locations
  Clone ID: PAT_MRT3847_99516C.1.pep
RVLKGLXKXXVVPNEILPNLEELDVKDLNSIXNSLAQLNLVGKRKFRIXGNCKIKTLVIFEKVSSTSTKYYYYX

SEQ ID NO: 285147 - protein, 204 aa, Glycine max
  Clone ID: PAT_MRT3847_99517C.1.pep
MFHVSTVALNPQPHNFLFPLPVSTSRNLPLSQTLHFPRNWNLRSLSPSLHLTYDDSDDHVIGDCVVFEDGVFDEPVFHNHHLNSDNLAVDKPKPKPGRSWRKKVEETLGENLVPDKWREVQAEINITKREMRKIAREVEFNSKVEKKRRGLIPPYKEAKLAQMKLLDYASWSPGGPNVPEAEPEFNRGGGKGLRLNLNLTAVNV

SEQ ID NO: 285148 - protein, 149 aa, Glycine max
  Clone ID: PAT_MRT3847_99518C.1.pep
MFHVSTVALNPQPHTFLFPLPFFTSRNLQLSQTLQFPRNWNLRSISPSLHPTPQYDDSEDHVIGDCVVFEDGVFDEPLFHNHHHNPDNLTVDKPKPKPRPSWRKKVEETLGENLVPDKWREVQAEINITKREMRKIAREVEFTARLKRR

SEQ ID NO: 285149 - protein, 57 aa, Glycine max
  Clone ID: PAT_MRT3847_99519C.1.pep
KEKKLFPYPPYYPGYEEYYLFFYPSEYHNPYGMAGSKPNNLLRREYGIFLKWKGPKL

SEQ ID NO: 285150 - protein, 448 aa, Glycine max
  Clone ID: PAT_MRT3847_9951C.1.pep
MREILHIQGGQCGNQIGAKFWEVVCAEHGIDSTGRYQGDNELQLERVNVYYNEASCGRFVPRAVLMDLEPGTMDSVRSGPYGQIFRPDNFVFGQSGAGNNWAKGHYTEGAELIDSVLDVVRKEAENCDCLQGFQVCHSLGGGTGSGMGTLLISKIREEYPDRMMLTFSVFPSPKVSDTVVEPYNATLSVHQLVENADECMVLDNEALYDICFRTLKLTTPSFGDLNHLISATMSGVTCCLRFPGQLNSDLRKLAVNLIPFPRLHFFMVGFAPLTSRGSQQYRALTVPELTQQMWDAKNMMCAADPRHGRYLTASAMFRGKMSTKEVDEQMINVQNKNSSYFVEWIPNNVKSTVCDIPPTGLKMASTFIGNSTSIQEMFRRVSEQFTAMFRRKAFLHWYTGEGMDEMEFTEAESNMNDLVSEYQQYQDATADDEGYEYEDEEEPQEDEV

SEQ ID NO: 285151 - protein, 125 aa, Glycine max
  Clone ID: PAT_MRT3847_99520C.1.pep
PVVFPSLGLEPPVFFPPPNGDFPAPGKTGSCPKTRWKGVKVFGAPPFNGARSQGLSPPPPWLPWKPHFFVYSFLSPSLVKKKPGPSSGYLFEFIGFCLFNYFGARFPEFLWGFGLNCYYFLLVFE

SEQ ID NO: 285152 - protein, 62 aa, Glycine max
  Clone ID: PAT_MRT3847_99521C.1.pep
HILLSNIGTQEKTAHAYDITAIEYRGIHAVTNFDLSTYIKRLKPSGGGTPKANLESHAGLEH

SEQ ID NO: 285153 - protein, 109 aa, Glycine max
  Clone ID: PAT_MRT3847_99522C.1.pep
GGGPICTGGRMKCALTGWRQHTRGRWWEKAIKPILGAVTYATIASASWAEPDPGKAQLRNNVAVARFGISEVAGSGNVITAAFGARAGVGAFGFGTRLFGELGGSVLQV

SEQ ID NO: 285154 - protein, 55 aa, Glycine max
  Clone ID: PAT_MRT3847_99523C.1.pep
AAFVLDQKFHTEFLLPTYKTQTSKHKFFTSKTILTKKIILQELTQKHAKYSTLKA

SEQ ID NO: 285155 - protein, 42 aa, Glycine max
  Clone ID: PAT_MRT3847_99524C.1.pep
IYKNLNHKNAKTSIQKHDLISLLFFFLIYSKQNKLTIIGIHG

SEQ ID NO: 285156 - protein, 37 aa, Glycine max
  Clone ID: PAT_MRT3847_99525C.1.pep
TTHDIMAQVGDGPRPLAVVRRLDDPPITYSSPSCAKE

SEQ ID NO: 285157 - protein, 68 aa, Glycine max
  Clone ID: PAT_MRT3847_99526C.1.pep
RPFFFFFFFFFFFFFFFFFRACIRIYHFTIKQQTIMSKANNATGDSFSSSVAAGTPYAYDGSLTAAAN

SEQ ID NO: 285158 - protein, 58 aa, Glycine max
  Clone ID: PAT_MRT3847_99527C.1.pep
GASKDSPGSNSRLLATIVAGSVLAGELSLMSAIAAGQLVKSHMKYNRSSKDMSKVSSS

SEQ ID NO: 285159 - protein, 437 aa, Glycine max
  Clone ID: PAT_MRT3847_99528C.1.pep
IPWSRLGSIGGRVLYPSCNIRFELFQFYKDNDKSGTPSSPERRKGKSRIIILIVVLASISVTLFFAAYYFLHKKARKRRAAILNSARGRGIATLESLQFDLATIIAATNKFSDQNKIGKGGFGEVYKGILLDGSQIAVKRLSKSSKQGSNEFKNEVLLIAKLQHRNLVTLIGFCFQEEEKILIYEYVPNKSLDYFLFDSQPQKLSWSERYNIIGGIAQGILYLHEHSRLKVIHRDLKPSNVLLDECMIPKISDFGLARIVEINQDKGNTSVIVGTYGYMSPEYAMFGQFSEKSDVFSFGVMVLEIISGKKNFSSYESHRITNGLLSYVWKQWSDHTPLNTLDPDITENYSEIEVIKCIQIGLLCVQQDPDARPTMVTVASYLTSHPIELPTPQEPAFFLHGRMHENPVANESSSNQSINTSTPFSNNQMSISQFLPR

SEQ ID NO: 285160 - protein, 115 aa, Glycine max
  Clone ID: PAT_MRT3847_99529C.1.pep
KKSKSPAASSIVAFLRRPPIHSCSNAIIIYGPNHNLVINGNSPLQSCISSNTHYVAGNEGGACQVQPQANTQKLNTRTHFQKQPKSRSLWKFKLQRAMSNPWSGGFTAESRATLS

SEQ ID NO: 285161 - protein, 58 aa, Glycine max
  Clone ID: PAT_MRT3847_9952C.1.pep
VFCRYHPACVGMTIEEAKKLEHFVCSECSSDDDMKKPHATFSVSPGSDVKVEPKRRKR

SEQ ID NO: 285162 - protein, 75 aa, Glycine max
  Clone ID: PAT_MRT3847_99530C.1.pep
FQVVSTLHFVWPLGDWLHAKCELVRLWLGLGFFSGTCICRTFGFHCSSALCMCSYFGSVLPFAIALPFVFAINLL

SEQ ID NO: 285163 - protein, 145 aa, Glycine max
  Clone ID: PAT_MRT3847_99531C.1.pep
LINIAPSKVNKKKSGRKIKLIKYLKNTFEVCVTTACGIVAITAMVITAHTLTAVIMGPAILSFPFKHFKRKLRAYEFSEKGSQSKVYDQLGIAAKGTYILNRDFDTMSRLVVRLHDEIEHSRAMVQLCLDSKEDKFSLQVVKADE

SEQ ID NO: 285164 - protein, 122 aa, Glycine max
  unsure (1)..(122): unsure at all Xaa locations
  Clone ID: PAT_MRT3847_99532C.1.pep
MNWSTSETEKGMFDAILEGMLDMDNEPWPSISESAKDLVRKMLTCDPKECITTADALGNYFHPFAFXEGGEASDKHPDSAVLIRMKWFRAMNQMKKLALKVLAENLSKEETKGLRTYVQLHL

SEQ ID NO: 285165 - protein, 71 aa, Glycine max
  unsure (1)..(71): unsure at all Xaa locations
  Clone ID: PAT_MRT3847_99533C.1.pep
FSPPNEKPVKMFVXKKISFLDIFKVGELPCRGPPKDLVASPPPEKIFPYAQWARQYAVSLQKASSVLIPNF

SEQ ID NO: 285166 - protein, 69 aa, Glycine max
  Clone ID: PAT_MRT3847_99534C.1.pep
QILGNCLLQFTSHHNGRHIIVCLLMFNVTSYLLSYALVNSVWICGWCLSSVLGDSLMLGAGACAWLWYV

SEQ ID NO: 285167 - protein, 55 aa, Glycine max
  Clone ID: PAT_MRT3847_99535C.1.pep
GCEKTPKGMPCKSRHSFTKLQGAGLYVRALDNNNSPSATIACACSFLSHSPISSI

SEQ ID NO: 285168 - protein, 77 aa, Glycine max
  Clone ID: PAT_MRT3847_99536C.1.pep
SPTTRVTPRSPSNRAKLSVFTPPPAFPSHTSLAPGLAEASPTNVNRSPGWLWPPLHSEMTGSSPSCVFPLFVPGPPS

SEQ ID NO: 285169 - protein, 100 aa, Glycine max
  Clone ID: PAT_MRT3847_99537C.1.pep
MWVWPLFWPPRLFPFFFRVFFFLGFWPDILFSPETLFPLVCPIFFCSPFKENWVARRFPSRISWVSPPSPKKKKKKKKKTKKKKKKKIKKKKKKKKKKKS

SEQ ID NO: 285170 - protein, 63 aa, Glycine max
  Clone ID: PAT_MRT3847_99538C.1.pep
IGVVRSNQVLNSSESASLPNPKNVEMGKRKPCELLETDASSIVWYHSNTVFAVVQRGQCQPFT

SEQ ID NO: 285171 - protein, 139 aa, Glycine max
  Clone ID: PAT_MRT3847_99539C.1.pep
MSQVITLRKPVFVKVSDLKPGQNGFNVYLKVVEVNHEKATKIDGTTLEIAEALCGDSTGVVKVRAIGENAAKIQQGKVISIRNGRSEVFKERMRLEVDRWGKIQEETGVDVQDVKKDNNLSDVAYEVKRVVVNTRDGEP

SEQ ID NO: 285172 - protein, 121 aa, Glycine max
  Clone ID: PAT_MRT3847_9953C.1.pep
FNLKLKEVTFVIMPQLEILPHWVQGCANTLLSLDLSYCLNLEVLPDWLPMLTNLRELNIDFCLKLRSLPDGMHRLTALEHLRIKDCDELCIKYKPQVGECWDQISHIKQITIDEQKIWKKR

SEQ ID NO: 285173 - protein, 152 aa, Glycine max
  Clone ID: PAT_MRT3847_99540C.1.pep
MDQQQRHVSSGTTNPVAVLRFSTGRAFPFARLIAASRRRLFLSDCADHRSDDDGDSDADAGECAYSRAVLVLDMVWNLAFVDAAAGVLPSTLRERTATPLRLWLCGYAFECVLHVACVYIESRTRIDDSFSHTTYSIEKKLEAMDTLASSVW

SEQ ID NO: 285174 - protein, 112 aa, Glycine max
  Clone ID: PAT_MRT3847_99541C.1.pep
YKLFNPIIEDYSNVLVPILNFEFGVFIIQLVAKINSDSTHSLENAGWGSELNQKFAAQIQFEHGRQQTSAMMDTSLFIDTLTMHAWGQIYILKNMVVDNIIIIVSYMILKIF

SEQ ID NO: 285175 - protein, 107 aa, Glycine max
  Clone ID: PAT_MRT3847_99542C.1.pep
GPLNPSFLGVRDIPQMKPLVGGTFLYFPNFGRGARPPPSPGFKEGVLLEPKIFVSFEPKEFPPFPLNSPQSWGVLGGLTPDFVVPYCWPFFYGQKIVGLLFKWGFFF

SEQ ID NO: 285176 - protein, 66 aa, Glycine max
  Clone ID: PAT_MRT3847_99543C.1.pep
CYCSVCRLLCLYQQGAWALIIDIDAMKVTRSTLGSPTGELTSSAQVRNALFCPTIPYRYEIRLPII

SEQ ID NO: 285177 - protein, 90 aa, Glycine max
  Clone ID: PAT_MRT3847_99544C.1.pep
KHQSDYQVKPLLPPQCRGHNGCPKSPGLRIWHIERVSSERMSKSRISQVRIQPYNPSRLLYIENMRGCIACVPSGEKLGYVARNRARHLA

SEQ ID NO: 285178 - protein, 73 aa, Glycine max
  Clone ID: PAT_MRT3847_99545C.1.pep
LVLRTHETPASPTLSADTTGARERRTSNAIHLLLSSASHLNLSFSYIEWWPVKQRTGLDAGGLAIAEIADRER

SEQ ID NO: 285179 - protein, 43 aa, Glycine max
  Clone ID: PAT_MRT3847_99546C.1.pep
GVKEFIMKMVHIQTKLKSHKLTLMRNSLLNMPKIAYPPILHKL

SEQ ID NO: 285180 - protein, 378 aa, Glycine max
  Clone ID: PAT_MRT3847_99547C.1.pep
MGIRSVFDGGELRREVEKSGIDPKFIPKIWKHILISAKDEDWDWEKQVPSLPSSAYSLLRSNFKTPLSSSIHSVFHSADNLTTKLLIQLHHNHGPFVEAVIMRYDTRLGKYAGQPRPGGLRATLCISSQVGCKMGCNFCATGSMGFKNNLSSGEIVEQLVHASTFSQIRNVVFMGMGEPLNNYSAVVEAVRIMTGLPFQLSSKRITISTVGIIHAINKLHDDLPGLNLAVSLHAPAQDIRCQIMPAARAFPLGKLMDSLQVYQRKSLQKIFIEYIMLDGVNDEEHHAHLLGKLLETFQVVVNLIPFNSIGTLSQFKPTSEQKVSNFQKILRGTYNIRTTVRKQMGQDISGACGQLLVNISDKSLGTAVPLTDIEDIVI

SEQ ID NO: 285181 - protein, 95 aa, Glycine max
  Clone ID: PAT_MRT3847_99548C.1.pep
SLVFFHHFTHFGFGNLSSSTASSFLVREEAFGPASSVDLSVVDRGGSCVTISCSRRSSSSPTLDSLLFSSLTSWPDLSEPNSIFKEESFSFPFFL

SEQ ID NO: 285182 - protein, 54 aa, Glycine max
  Clone ID: PAT_MRT3847_99549C.1.pep
SEEHVTIHRHAIEPEIMPEAYCAHVCMRELRSASYARQHWTFVALCTSSTCDYR

SEQ ID NO: 285183 - protein, 64 aa, Glycine max
  unsure (1)..(64): unsure at all Xaa locations
  Clone ID: PAT_MRT3847_9954C.1.pep
ASRRWTFLGLKYHEWVHYYXFLFLGLILLHAGMSSYYTNTVANFNRRLLSSYFFLGFEHIELCS

SEQ ID NO: 285184 - protein, 44 aa, Glycine max
  Clone ID: PAT_MRT3847_99550C.1.pep
GGLFFFPPPKRYFPSFFTPPPPPPPPPPPPPPPPPPPPPPPHPP

SEQ ID NO: 285185 - protein, 52 aa, Glycine max
  Clone ID: PAT_MRT3847_99551C.1.pep
TVASGRRMVGYSRLMYFTDSVTARIPDFRLMHRTSSGSNHRHMVMLRVIAIS

SEQ ID NO: 285186 - protein, 120 aa, Glycine max
  unsure (1)..(120): unsure at all Xaa locations
  Clone ID: PAT_MRT3847_99552C.1.pep
MRLFIVEEAYNKLIVELAKSVPTLVGIEXPKDEKLXSLRTIDKXKTRCFTILPMAFNLVVRPKLINFARHIMKKWDTLSCQDAINPYSIEWTGLANRLLSKGDYILRRDYASYDGLITKQ

SEQ ID NO: 285187 - protein, 32 aa, Glycine max
  Clone ID: PAT_MRT3847_99553C.1.pep
IHDSQSHTLFSILGFASVKEVGEKKGVGWCRI

SEQ ID NO: 285188 - protein, 64 aa, Glycine max
  Clone ID: PAT_MRT3847_99554C.1.pep
HKKTPPCGVFSARAPLWRFLTRAPSWGVLGIPPWCRLVEHVPLWGVLSDVPLCMAYSSRPLEIG

SEQ ID NO: 285189 - protein, 400 aa, Glycine max
  Clone ID: PAT_MRT3847_99555C.1.pep
MGSSMLRLVLGLSVLSCVLVTSSAQTCRNQTFSNRVFATCRDLPQLTAYLHWTYDQASGRLEIAFKHAGITSTNRWVAWAINPRNTLDPAMIGAHALVAIPQSNGSPRAYTSSIASTSTTLEEGAISYPVSGLSATFESNQVTIFATLTLPNGTSSLVHVWQDGPLSGTTPQEHSHETSHQNSKEILDLLSGSSTQATGNSRQKRRNTHGVLNAVSWGILMPTGAIIARYLKVFKSADPAWFYLHITCQASAYIVGVSGFGTGLKLGSDSEGVEYDTHRALGIVLVCLGTLQVFALFLRPNKDHRYRVYWNVYHHLVGYATIIISVVNVFKGFDTIEIYVGDRYNSWKHAYIGIIGALGGIAVFLEAFTWIIVFKRRKSENKIPHGANGVNGYGSRPQQV

SEQ ID NO: 285190 - protein, 71 aa, Glycine max
  Clone ID: PAT_MRT3847_99556C.1.pep
DKAAGLTTLTFVKETSSGEIASIQHNKKIKYILAFTKLLKLHLPRSSNINRIETQSKTYQIQNLGNTRMVR

SEQ ID NO: 285191 - protein, 99 aa, Glycine max
  unsure (1)..(99): unsure at all Xaa locations
  Clone ID: PAT_MRT3847_99557C.1.pep
IKHTLKKKFVQLQKIIDQYSIXYNEIKEKQEPRVYDTLTRNXVGLIRELNINNRRMYDLYADLSSSFTKSMEVTSEGDSSGGAVKSSDGKAGHKRHRPV

SEQ ID NO: 285192 - protein, 62 aa, Glycine max
  Clone ID: PAT_MRT3847_99558C.1.pep
AKQLKIDGHNMRFIYKHIQVCLGNKSLYMVLTFSPFVPLSHFNFFSKMAMVDIYNPPSTKRT

SEQ ID NO: 285193 - protein, 70 aa, Glycine max
  unsure (1)..(70): unsure at all Xaa locations
  Clone ID: PAT_MRT3847_99559C.1.pep
SPXXXXXTXXFXLGQXNCCITLPLSAXXFFWLLGNWFXLYCHXLSASYIPXXXQSQFITALSIGXRWHXK

SEQ ID NO: 285194 - protein, 216 aa, Glycine max
  Clone ID: PAT_MRT3847_9955C.1.pep
MAKTRPGRKDLDSYTIRGTNKIVRAGDCVLMRPSDTSKPPYVARVEKIEQDSRNNVKVRVRWYYRPEESIGGRRQFHGAKELFLSDHYDVQSAHTIEGKCIVHSFKNYTKLENVGAEDYYCRFEYKAATGAFTPDRVAVYCKCEMPYNPDDLMVQCEGCKDWYHPACVGMTIEEAKKLEHFVCSECSSDDDMKKPHATFSVSPGSDVKVEPKRRKR

SEQ ID NO: 285195 - protein, 62 aa, Glycine max
  Clone ID: PAT_MRT3847_99560C.1.pep
GVLFGWRFWNENYVILACFDISMRRWKLICVSFLLLVNNHFPPTELLVALVKLEVLVGRCIL

SEQ ID NO: 285196 - protein, 49 aa, Glycine max
  Clone ID: PAT_MRT3847_99561C.1.pep
INFDRAYFHPPIASTVGALKYMNIVPISDTETDKLIRHQTRRNLHLERA

SEQ ID NO: 285197 - protein, 173 aa, Glycine max
  unsure (1)..(173): unsure at all Xaa locations
  Clone ID: PAT_MRT3847_99562C.1.pep
MGVQDVLSRKTGVIVGDDVLRLFEYAREKQFAIPAINVTSSSTVIASLEAARDAKAPIILQMSQGGAAYFAGKGVSNTNQAASIAGAVAGAHFIRQIAPTYGIPVVLHTDHCAKKLLPWLDGMLDADEAHFKATGEPLFSSHMIDLSEEEVDWNVKTTAXYLKRAAPMKQWLE

SEQ ID NO: 285198 - protein, 75 aa, Glycine max
  Clone ID: PAT_MRT3847_99563C.1.pep
ATSLSIHLSIQHHVSFCLHRDIISGRLTIHRGIHRHRLMHRILRIMSFVRIRTRRGTNHQSRLINDVANDPPQAL

SEQ ID NO: 285199 - protein, 39 aa, Glycine max
  Clone ID: PAT_MRT3847_99564C.1.pep
RLHSVVRSARVAMRGYRFVDPLLLVSVCAVKRWSRATSF

SEQ ID NO: 285200 - protein, 357 aa, Glycine max
  Clone ID: PAT_MRT3847_99565C.1.pep
MGIKKTQATSTTKQGGMSSQGTGSVVDFDLPDEILSVIPTDPYQQLDLARKITSMAIASRVSSLESDASRLRQKLLEKDRIILDLEDRLSSLTRASHQTDSTLNTALNENIKLSKERDQLAATVKKLSRDFAKLETFKKQLMQSLTDDNASHAETIDIGTCDQSVPKAYPDKDDDGSGYMVHHSYNGPADVGKTNDEASRYSGQRFSLTPYITPRLTPTGTPKVISTAGSPREYSAAGSPKKTSGATSPTKLPYDGRTSLSSWYSSSQQSSAANSPPWGRSLPVRTPKIDGKEFFRQARSLLSYEQFSAFLANIKELNAQKQTREETLRKADEIFGSHNKYLYLSFKRFPYLYAHLA

SEQ ID NO: 285201 - protein, 71 aa, Glycine max
  Clone ID: PAT_MRT3847_99566C.1.pep
GSPIWTSQPISSRGEGISYYVDVLEEIPPEQVLVGPSCSSTAPSCHFRSLTADHRVKEHPLFPGGRILGDG

SEQ ID NO: 285202 - protein, 242 aa, Glycine max
  Clone ID: PAT_MRT3847_99567C.1.pep
LEDAVETLNESTENSNPNTNSPDLAVVLFHPHHAEIHLIAQGVATRCTKIEPSSNSRNSVYFRQVFAAFVKRVDFKVVKRVVITSEEFRRFVMSEARKSRMRSIEENQSRIMVVAGGDSLEKVMGDRAVMELVKDKKVAAFRELWEMVCDDSDRACYGPAEVERAREARAIETLLITDDLYRNEDVETRKKYASLVKSVKEGGGKALVYSSMHVSAPQLAQLTGVAAILRFPLPELEDVNGC

SEQ ID NO: 285203 - protein, 260 aa, Glycine max
  unsure (1)..(260): unsure at all Xaa locations
  Clone ID: PAT_MRT3847_99568C.1.pep
MQLASNGDKEECSESEPILNHHHLHLQPTGESSFSCEIMPIPPAAATFNDDDLQNVRVDETWHLVNADLQQFAKCRDITXEDLISPCHCPATQRFAYCHCTECRAVFILRANVSHCTVGGAVFILRANVPXKIRWWLRLKFQFLVARDHAFIFIIVQLVVAFLGVLVYKFYGYXLMDIFGYVDHSHGFYTIAVLGIVRVGLLYYHFLAIICWQRINELDYHVLAKQELTMEYVVEDREHVKNVPELDPSHVTELRMLGLY

SEQ ID NO: 285204 - protein, 50 aa, Glycine max
  Clone ID: PAT_MRT3847_99569C.1.pep
MAEKKEMIPQQFNINAKWNTYIDLTIHHFIYSTTTNAFNNLLFFKIPITQ

SEQ ID NO: 285205 - protein, 73 aa, Glycine max
  Clone ID: PAT_MRT3847_9956C.1.pep
LMKRDNDVSWKWVICFLQIFFTGSIWVICKGIFLLLHIVHHYEVSFMLYLCNTLLTLTHNVHVKKMVSSNTSC

SEQ ID NO: 285206 - protein, 196 aa, Glycine max
  Clone ID: PAT_MRT3847_99570C.1.pep
GPPGQEAVANAEISAAMLTARAGARDPSAIPSICRVSAALHYPAGLEGSDAGLASVLESLEFCLKLRGSEASVLEDLLRAINLVYIRRDLVQSGEALLNHANLVQQEYEKTTKFCLSKADEQEKTIMEEWLPELKNAVLSAQQSLEDCKYVRGLLDEWWEQPASTVVDWVTVDGQNVTAWHNHVKQLLAFCDKELL

SEQ ID NO: 285207 - protein, 111 aa, Glycine max
  Clone ID: PAT_MRT3847_99571C.1.pep
YISLHCDRWDLLANIQNSFCTRLSTANHTQAFFCTKPKSCCTYFDSKILHKCRFRKSHFLSSNLAQINSYKSQIMYQSCLTQSQASKHSNTESRCPKPLNSMGFLGLKSEI

SEQ ID NO: 285208 - protein, 54 aa, Glycine max
  Clone ID: PAT_MRT3847_99572C.1.pep
EFGFLFGVNPLVFYSLGPGNFWTPLCLIIAKTPRLFFNSLIKSLAFFLMVFMLV

SEQ ID NO: 285209 - protein, 166 aa, Glycine max
  Clone ID: PAT_MRT3847_99573C.1.pep
PARARAESARAGLRPSRRDFPSSTHTSRPRDRFRERENGRSGNEGSTRAGSGSLQPEIPSTSSSMAPSPTIVLSGSRTFSGQPPTILQSRDRQDDTGSMYEENVDGSKGSGDTSSIGDPELVSAFDGQSGGYGSQRHSSRGSKSRQLGERRDRDSRREGKWERKHS

SEQ ID NO: 285210 - protein, 72 aa, Glycine max
  Clone ID: PAT_MRT3847_99574C.1.pep
SKSFSFHSQISTGCLSRETSKRRPTTTDEDAPCRNITFATLFILMANLLHIILYTLLLDAFSSYRIRICTGA

SEQ ID NO: 285211 - protein, 250 aa, Glycine max
  Clone ID: PAT_MRT3847_99575C.1.pep
MAYRSAIVRRAQEASHRDTWRAALSEFISTLIFVFAGSGSSVAVNKLTVDKPSALVVAAVAHAFALFVAVSVSTNISGGHVNPAVTFGAFVGGNLTLLRCVLFWIAQILGSVIACLLLKFITGGQDVPVFKLSSGVGVGNAVVLEMVMTFGLVYTVDATTVDPRSRRGSLGVMAPIVIGFIVGANVLVGGPFDGASMNPAASFGPAVVGWSWKNHWVYWVGPLVGGGLAGFMYELIFVSHSRQRFRRSYY

SEQ ID NO: 285212 - protein, 271 aa, Glycine max
  Clone ID: PAT_MRT3847_99576C.1.pep
WQKRIAAKSSSITAQSPSQLSKKQLPTKLSPNSRKGSKFSDSEPGASSPLQRFPVRTASVGSNDSLKASKTSRLISGSHLDSNKLSRSVSSLPESKIEKDDSTTDTKASMARIRRLSEPKMSNTRQTSSVKPHGTGTISKTKAADGPESKKISAIVNHDKSKTAALPELKIRTSKATDVPQNRTAVKEKAHKLNDNKSSMNSQGTMLKKNEIGTSFNDDGDNNPVVEKTGVMLEREKPYVPPIHSSEENFDIPKKQYDNDEVMEKTETASN

SEQ ID NO: 285213 - protein, 85 aa, Glycine max
  unsure (1)..(85): unsure at all Xaa locations
  Clone ID: PAT_MRT3847_99577C.1.pep
XMCFLMVHQLQHCQQSIXXLYGXSQAMAXXPASSHLSIPFKXKSEVKXPISVFKNIAPVHSTAAAGPSXLAQPXLSPYASNCCKQ

SEQ ID NO: 285214 - protein, 123 aa, Glycine max
  Clone ID: PAT_MRT3847_99578C.1.pep
ALRSELCGAQNDAVVQMIEGKKHGKAHRRPIEAYIVANELINEVNGDANGSTNRRGYDDAIEETVGMYGAMQRAAPRKHSIREPIMVPAIIDPNTDLGTVVSYTEDCTYDGLGRGRYAKRSGG

SEQ ID NO: 285215 - protein, 50 aa, Glycine max
  Clone ID: PAT_MRT3847_99579C.1.pep
LNQNQLIFKFQHRARTSVIKRQMAAHVIKPKICPENMTKGLQIMTATWWL

SEQ ID NO: 285216 - protein, 53 aa, Glycine max
  Clone ID: PAT_MRT3847_9957C.1.pep
RWGLYKPRRQWPRFPPQKNPVIDLLETDNTLSCFRKRLWYPHASRSHGRFIQN

SEQ ID NO: 285217 - protein, 92 aa, Glycine max
  unsure (1)..(92): unsure at all Xaa locations
  Clone ID: PAT_MRT3847_99580C.1.pep
TXXTXXXXXIRXXXXXQXEXXTXSXXHVXXXXXXVXXXXHCIXXQWXXNTYXXXXXLXXXSXXXSCXXGXLXXHGXKXGELXXIXXXWVXXX

SEQ ID NO: 285218 - protein, 98 aa, Glycine max
  Clone ID: PAT_MRT3847_99581C.1.pep
MFAGTSAARFSAAYSPRLQFRALELSVGVSLDRLPSSKSTSAGEEEPPVSNSLMAAIKRSQANQRRHPESFHMFQQSQQGTASTSFLKVELKHFVLRS

SEQ ID NO: 285219 - protein, 206 aa, Glycine max
  Clone ID: PAT_MRT3847_99582C.1.pep
MGSEGPPAAVTVHVTGFKKFHGVSENPTETIVNNLTEYLKKKGLSKGLVIGSCSILETAGQGALIPLYKTLQSAITSKESESSSSNKIIWLHFGVNSGATRFAIERQAVNEATFRCPDEMGWKPQTTLLPVEEITKALANKGYDVMTSDDAGRFVCNYVYYHSLRFAEQNGTKSLFVHVPLFSTINEETQMQFAASLLEVLASTCQ

SEQ ID NO: 285220 - protein, 55 aa, Glycine max
  unsure (1)..(55): unsure at all Xaa locations
  Clone ID: PAT_MRT3847_99583C.1.pep
KSASRKQRQPQPGGQLPVAYPQQYLPYNQLAALNAPAXYSGKQLLPFSQLAGASP

SEQ ID NO: 285221 - protein, 96 aa, Glycine max
  Clone ID: PAT_MRT3847_99584C.1.pep
MGSEGPPAAVTVHVTGFKKFHGVSENPTETIANNLTEYMNKKGLPKRLFIGSSSILETAGQGALVPLYQRLQSAVNAKDSESSNSNKIIWVSCPCT

SEQ ID NO: 285222 - protein, 224 aa, Glycine max
  Clone ID: PAT_MRT3847_99585C.1.pep
MGSEGPPAAVATVHVTGFRKFHGVSENPTETIVNNLNEYLNKKKGLPKGLVIGSCSILETAGQGALIPLYQTLKSAITSKESESSSSNKIIWLHFGVNSAATRFAIERQAVNEATFRCPDEMGWKPQKVPIVPSDGAITRIRETTLLPVEEITKALANKGYDVMTSDDAGRFVCNYVYYHSLRFAEQNGTKSLFLHVPLFSTINEETQMQFAASLLEVLASTCQ

SEQ ID NO: 285223 - protein, 48 aa, Glycine max
  Clone ID: PAT_MRT3847_99586C.1.pep
LLTLMELQLILVNMILALPMAMMMMMPCYSLAVDINQQLRQVPPKHNV

SEQ ID NO: 285224 - protein, 62 aa, Glycine max
  Clone ID: PAT_MRT3847_99587C.1.pep
LVSYKPYATSLHLRSICAAALASRAGSLQSPDRRKYIALGSTSSLSGQLAVSRPYVILGRHV

SEQ ID NO: 285225 - protein, 63 aa, Glycine max
  Clone ID: PAT_MRT3847_99588C.1.pep
SIFLSACDFNFLIRSLVLHHRNGRFEVKRFHIGKVILRSSSLTPISCPDSWTKQCFVPASSCL

SEQ ID NO: 285226 - protein, 52 aa, Glycine max
  unsure (1)..(52): unsure at all Xaa locations
  Clone ID: PAT_MRT3847_99589C.1.pep
MVLDIWEKENVKYNMCFXSGNKERDLXRNQAXYGCCNFLKVEKEECEEGEIS

SEQ ID NO: 285227 - protein, 66 aa, Glycine max
  Clone ID: PAT_MRT3847_9958C.1.pep
MDSFTERAYIKPRLLKYSSKNSTNQQNNFDATSNNLKLLPIFFIVTSNRYLSPLFHLILHGPMNLY

SEQ ID NO: 285228 - protein, 118 aa, Glycine max
  Clone ID: PAT_MRT3847_99590C.1.pep
QLSGGQKQRIAIARAVLKNPKVLLLDEATSALDSQSEKVVQDALERVMVGRTSVVVAHRLSTIKNCNRIVVLNKGRVVKKGTHLCLLSKGPSGVYYSRVSLQRSAPTNSAIDNEFSIN

SEQ ID NO: 285229 - protein, 81 aa, Glycine max
  Clone ID: PAT_MRT3847_99591C.1.pep
VMQSKNINKNQQQTKTKTIPKHIRNKKSMNQKGAYLRNKIKIKNKKTLSKSILPMVTREIKSKAQIMTKSKSTNLNYRRNA

SEQ ID NO: 285230 - protein, 190 aa, Glycine max
  unsure (1)..(190): unsure at all Xaa locations
  Clone ID: PAT_MRT3847_99592C.1.pep
GLWDSEKKALYITLXXXXGGGLTAWLVHISKTSHQKRFRPFRLSRHKFSLPREHFYRPPSLWEDFKSYAGLLLDGFLLPQILLNIIFNSHASALASSFYVGTTIVRILPHAYDLYRAHSSAWYLDLSYIYANHRMDFYSTAWDIIIPSGGILFALLVYFQQRFGSRCILPKRFRESTAYEKVPVIGNDDL

SEQ ID NO: 285231 - protein, 82 aa, Glycine max
  Clone ID: PAT_MRT3847_99593C.1.pep
NDFYIICKKSHTISGLASACNFFQKSMSVSFSFSIICCSFPNIPGLNELSAPTCVPSVITEDVPKASSNRSAMVFSHNRGCP

SEQ ID NO: 285232 - protein, 46 aa, Glycine max
  Clone ID: PAT_MRT3847_99594C.1.pep
ALLCIINSTVFDGHLSFGGTLLLFVYSQRCIHHVHMVLMLDSAYSR

SEQ ID NO: 285233 - protein, 97 aa, Glycine max
  unsure (1)..(97): unsure at all Xaa locations
  Clone ID: PAT_MRT3847_99595C.1.pep
IPLNTSHPFIITPYFYLNAPPFESQXFNFLMTIAPRKKHHVYQHALNLTLYEYTQLLILLKPLLPTLHYRLLTLSLTTLGHIILHHLHFLYTIKLPH

SEQ ID NO: 285234 - protein, 143 aa, Glycine max
  unsure (1)..(143): unsure at all Xaa locations
  Clone ID: PAT_MRT3847_99596C.1.pep
MGVLTFEDEINFRVAPATLRTALITDADIVIPNALDTFKSVENVKGNGSPITIKKITLLEDGETKFVLHKIDCIDEANLRYSYSVVGSAALPDTADKITFNYKSDAGPKEWSAGKLTVKYXTQGDADPNQDELKTGKAKADAL

SEQ ID NO: 285235 - protein, 127 aa, Glycine max
  Clone ID: PAT_MRT3847_99597C.1.pep
FNKDSSKGLIQSQFIMKDSRNSTNLRYLFSYKIFEVMQTNIVTVIMKKKEVISSESYKYTHAGSFMYFHCVNRTCKGWDLILYIFHHVGRILSCPVIGGTLPSSTKLYFCSFLPINHKPSMSHTQTF

SEQ ID NO: 285236 - protein, 79 aa, Glycine max
  Clone ID: PAT_MRT3847_99598C.1.pep
KNKGSSTTSTGFEQKPVQRTPSDHFAIILKWASSRHYLVTATTTPPARPRKLFLGSALGPAHTGMLLKAEWGWGLLAVL

SEQ ID NO: 285237 - protein, 85 aa, Glycine max
  unsure (1)..(85): unsure at all Xaa locations
  Clone ID: PAT_MRT3847_99599C.1.pep
FXGXGVVVXLLLLXXCGXXGXVGGXXGXXRLGGGLRCAAGGGGXPLALAVAGSGXXXFXLCGGCWXGSSTPRLGXWVCXXQQVRR

SEQ ID NO: 285238 - protein, 41 aa, Glycine max
  Clone ID: PAT_MRT3847_9959C.1.pep
HQSLGECLVTVSCCSCVCDLNLFQSFCASLSLSRLDYWQLD

SEQ ID NO: 285239 - protein, 38 aa, Glycine max
  unsure (1)..(38): unsure at all Xaa locations
  Clone ID: PAT_MRT3847_995C.1.pep
SSXXXLIKXSPLKXIXTFXXXXLPSETNVHNHXMXSXS

SEQ ID NO: 285240 - protein, 363 aa, Glycine max
  Clone ID: PAT_MRT3847_99600C.1.pep
MMAMAMAKSTPFAFTPLHLRSRLQQQQHHHNANFPQFKYLAPSPHNPFFLLNVSPSSQFRPFFAFPRQRPNFAIKALDSDAANQESVHVGKNESYQQWDSLTAKFSAAANFPFLLLQMPQIILNARNLLSGNKLALSAVPWLGMLTSLLGNLSLLSYFAKKREKEAMVVQTLGVVSTYVVLVQLALAETMPLPYFLATSVVVISGLVLNFLNYFGILNAGIWRFWEDFITIGGLSVLPQIMWSTFVPYVPNSILPGATSFVIAVLAVTLARTGKLSEKGVKFVGGISGWTATLLFMWMPVSQMWTNYLNPENMKGLSAFSMLLAMLGNGLMLPRALLIRDFMWFTGSVWATLFVTRRTPDYFL

SEQ ID NO: 285241 - protein, 114 aa, Glycine max
  unsure (1)..(114): unsure at all Xaa locations
  Clone ID: PAT_MRT3847_99601C.1.pep
RDXNLSGSNLDQVYPTRSYEINQQISYEVVLLLRHRTAQGTISPLLLVFSSEMTNVECSCKVANKSHLPSKKEKREVLVKLDCGFVASSFGFDMVLMKPKLICMSERRRAKKMV

SEQ ID NO: 285242 - protein, 97 aa, Glycine max
  Clone ID: PAT_MRT3847_99602C.1.pep
SYTRIFGTNFSMGEAPALLVDDVQDGALNGLGLKNGTCKTAATVGDKMVSICNMLRISRLSVCMLVLIIRLVPSQIFCLKRKLGLQFFDSMSLVELM

SEQ ID NO: 285243 - protein, 71 aa, Glycine max
  Clone ID: PAT_MRT3847_99603C.1.pep
KTKEEEEMIVVAMKEKVASVQAEAYAQALDYTIVRGVINVLTNTSIMDETPKTSNAAIADEVVPQDKELAF

SEQ ID NO: 285244 - protein, 99 aa, Glycine max
  unsure (1)..(99): unsure at all Xaa locations
  Clone ID: PAT_MRT3847_99604C.1.pep
PVSSDPLPSQVSHHLVSELRLLIQVLFYPIPVFSFVICTGSCFVIVLLFVFLFASCCVLACAFVSFLFLLLLQFCSCSNLXCLSAFVSKKRISLSSISS

SEQ ID NO: 285245 - protein, 41 aa, Glycine max
  Clone ID: PAT_MRT3847_99605C.1.pep
QNIIKLVKDGFIIKKPTKIHSRSSARRMNDDTKNERLYGYA

SEQ ID NO: 285246 - protein, 55 aa, Glycine max
  unsure (1)..(55): unsure at all Xaa locations
  Clone ID: PAT_MRT3847_99606C.1.pep
AYLNVHLWLYGIKEVFSYPFSVIWDRILGTYMRNTLKSRXGGGFEISPCKVYKDD

SEQ ID NO: 285247 - protein, 51 aa, Glycine max
  Clone ID: PAT_MRT3847_99607C.1.pep
ISRGIRRCKISIEERGWRRFVETRLDDTEVDYADRGFSQNSFIMGKAMVGV

SEQ ID NO: 285248 - protein, 99 aa, Glycine max
  Clone ID: PAT_MRT3847_99608C.1.pep
RDLDQVKPEEIVGIAGKLSDAESMIALKDFINRMGSNDVWGEGIGVNTNADFRSGYIMNTSIAGLEKADAFLLVGTQVYLIISLMYFNNVCFLMLQMVK

SEQ ID NO: 285249 - protein, 40 aa, Glycine max
  unsure (1)..(40): unsure at all Xaa locations
  Clone ID: PAT_MRT3847_99609C.1.pep
NYNYGGVLDFWSLKLWVKLAMLVEFHYLPFFLFXXXXGWF

SEQ ID NO: 285250 - protein, 46 aa, Glycine max
  Clone ID: PAT_MRT3847_9960C.1.pep
TISSSREVLFMWSAKKLLQRSSARMQHEIIIATSILSWTSPSILAH

SEQ ID NO: 285251 - protein, 41 aa, Glycine max
  unsure (1)..(41): unsure at all Xaa locations
  Clone ID: PAT_MRT3847_99610C.1.pep
RRRCXIHRREIFSSILTPTMGGGFWIDSINKFIYYYNICSI

SEQ ID NO: 285252 - protein, 46 aa, Glycine max
  Clone ID: PAT_MRT3847_99611C.1.pep
PTRPPTRPPTRTRTRGVLWARTYVSLSSKETGTYVWWMNHDRVIRA

SEQ ID NO: 285253 - protein, 614 aa, Glycine max
  unsure (1)..(614): unsure at all Xaa locations
  Clone ID: PAT_MRT3847_99612C.1.pep
RASGEVAQKLLLESESKRGKNSLIRAGYGGWLMYTAASAGDLGFVQVLLERNSLLVFGEGEXSVTDILYAAARSKNCEVFRLLFDFAVSPRFLSGKGGIMEENVGDIPSVYRWELTNRAVHAAARGGNLKILEELLANCSDVLAYRDADGSTVLHAAAGRGQVEVIKYLTSSFDMINSTDHQGNTALHVASSRGQLPTAEALVSAFPSLMSLRNNSGETFLHRAVSGFKSHAFRRLDKQVELLRNMLSGKNFHVADIINVKNNDGRTALHMAIIGNIHTDLVQLLMTAPSINVNICDVDGMTPLDYLRQHPKSASSDILIKKLISAGGMFGCQGHSSRKAIASHLRMQSIGSSPGTSFRVSDTEMFLYTGIENVSDASGDHGSGGMSSSSSEHIPYDLNATENRVPIAAKRPSTVNHAAASLKRVLLWPRVKDKKSEGFKKSSTTDEGSVDSCRKRNNSFDETPTPLRQRFSRPSSLPNNKRTLSVRSQQSSPNAKKRFASGPVHGVIQSMPHANVSGRSRSSSFSKSSISSPRSIDKQKGIFIDNDIAGPSCSSQPSPPPDDDESPKLVKRTSVGRKLRDHYFCFGAPGINVKNSVHRQQESQSYKAHVVAVA

SEQ ID NO: 285254 - protein, 127 aa, Glycine max
  Clone ID: PAT_MRT3847_99613C.1.pep
LGTLENWLLCNRHQIARVVGERAKNRGKSSSISLHQRKDEHRTNKRAHSARSMVCAPTRVEITTYAHTWDRAPMAMVGYVRLYARPLSSVTCRAQSANGARFICWHQPSNSCARCHNNSVDVMPVPR

SEQ ID NO: 285255 - protein, 111 aa, Glycine max
  Clone ID: PAT_MRT3847_99614C.1.pep
MYNGCSDDSAYGSDENSTDTDSYPAPKAHSNRNNLSVQKGKKKKKLKSKKSKAHECPICNKIFRSGQALGGHKRSHFVGGSEENTLVIRPSAPPAAVPCLIDLNLPAPVDE

SEQ ID NO: 285256 - protein, 272 aa, Glycine max
  unsure (1)..(272): unsure at all Xaa locations
  Clone ID: PAT_MRT3847_99615C.1.pep
VGCQQFEAGIQLMDEMVELGFSPTEAAVSGLVDGLRKQGKIDDAYELVVKVGRFGFVPNLFVYNALIIFLCKGGDLDKAELLYSNMSLMNLRPNGITYSILIDSFCRSGRLDVAISYFDRMIQDGIGETVYAYNSLINGQCKFGDLSAAESLFIEMTNKGVEPTATTFTSLISGYCKDLQVQKAFKLYNKMIDNGITPNVYTFTALISGLCSTNKMAEASELFDEXXERKIKPTEVTYNVLIEGYCRDGKMXKAFGLLXDMHQKGLGSDTYT

SEQ ID NO: 285257 - protein, 446 aa, Glycine max
  unsure (1)..(446): unsure at all Xaa locations
  Clone ID: PAT_MRT3847_99616C.1.pep
AIKEKKLFMFGYNDLSLPYVRKVREIKGTTLYGSRTLFFLTEQSTLKPLAIELTRPDMEGKPQWKQVFTPATHSTSHATKHCLWRSVXAHVLAHHSGIHELVSLWLRTHCAVEPFIIATNRQLSTMHPIYRLLHPHMRYTMEFNSLAREVLVNSNGFTESSFSPNKYXMEISSVASEHLCKYDLQALPNDLIHRGMAVVDPNAPHGLKLTIEDYPFANDGLLIWDAIKEWISEYVNHYYPSSSIIEFDQELQAWWTEIRTVGHGDKSEEPWWPNLKTPKDLIEIITTIAWVSSAHHAAVNFAQYTYGGYFPNRPTIVRNNIPTEDPSKEELEKLINNPEKTFLESLPSQIQATLVMVVLNLLSNHSPDEEYIGQYVEQSWVENQTIKAAFERFSTKLKEIEGIIDSRNANCDLKNRNGAGVVPYELMKPFSGPGVTGKGVPYSISI

SEQ ID NO: 285258 - protein, 101 aa, Glycine max
  Clone ID: PAT_MRT3847_99617C.1.pep
PTYVTLRASFLAPALTGCCPPTSFARSSILDPTGFSHTYSCYRMFVSVPCPFLVAVMSWAVRFRLYAVRMCPVGHVWLYPVPPPPPKEGGRHTVMTGNLPG

SEQ ID NO: 285259 - protein, 57 aa, Glycine max
  Clone ID: PAT_MRT3847_99618C.1.pep
MLESALPHYKEGGINWRFTKGKNDSLLCSTQRLLKGEHKDVLLNYYTRSVGITGLTV

SEQ ID NO: 285260 - protein, 66 aa, Glycine max
  Clone ID: PAT_MRT3847_99619C.1.pep
PMERHKCRCHACITHTHTTVDLLSPHASNSSSLPSIHLCHGGTNGCRLQSPNTVSTLSPLIPAGRT

SEQ ID NO: 285261 - protein, 104 aa, Glycine max
  Clone ID: PAT_MRT3847_9961C.1.pep
MAHTSGNALVQWLVASLLIAMLGGAKAYVLCDIESNKLSLCYAAVTGSHPKKPNEKCCEIVQHANLPCLCRYKSILPALGINPTNAFALPSKCGLKTSPKCKVI

SEQ ID NO: 285262 - protein, 263 aa, Glycine max
  Clone ID: PAT_MRT3847_99620C.1.pep
MLGIRLELAFVTDINVQVQEAINYYSIESSVALLVTLVINLFVITVFARVFYGTEQAKGIGLVNAGQYLQERYGGGLFPILYIWGIGLLAAGQSSTITGTYAGQFITEGFLKLNIKKWLRALITRSCAIVPTMICAIVFNTSEGSLDTMNEWLNVVQAIQIPFALIPLLTLVSKEEVMGTFRIGPIVERVAWSVAVLVILVYGYMLLDFFLDEVDGVLFGFLVFLGAAAWISFIIYLVQHSGAISSILVRSSYSKGFFSLAGN

SEQ ID NO: 285263 - protein, 68 aa, Glycine max
  Clone ID: PAT_MRT3847_99621C.1.pep
DIPGWFQWKDSFQFKTQVIAGDNPVKLSADDDEEETEAGYVSNDAPLERQELGHEEGIGQSSRHLDVA

SEQ ID NO: 285264 - protein, 56 aa, Glycine max
  Clone ID: PAT_MRT3847_99622C.1.pep
VYVPLYDGQLAVARAFGDRSLKMHLTSEPDVIVQEVDQHTEFFILASDGIWKVNFF

SEQ ID NO: 285265 - protein, 99 aa, Glycine max
  unsure (1)..(99): unsure at all Xaa locations
  Clone ID: PAT_MRT3847_99623C.1.pep
SXARVRKLGIRLEXXXXLRXXXXXXXXXXRXXXLSXXXXFRXXXDTXTXIXXXXXGXWXXXXXXXALKXXCDXXXXXXRYRXXXXVXPXXXXXGLXLRM

SEQ ID NO: 285266 - protein, 116 aa, Glycine max
  Clone ID: PAT_MRT3847_99624C.1.pep
MATAPAQIPTSFGHELRACLRCRLVKTYDQFRESGCENCSFFKMEEDHERVVDCTTPNFNGIISVMDPNRSWAARWLRIGKFVPGVYTLAVSEALPEEMQAICEDERVQYIPPKRL

SEQ ID NO: 285267 - protein, 116 aa, Glycine max; identical to SEQ ID NO: 285266
  Clone ID: PAT_MRT3847_99625C.1.pep

SEQ ID NO: 285268 - protein, 73 aa, Glycine max
  Clone ID: PAT_MRT3847_99626C.1.pep
FSFRLFGNILAEELGGVVPVFLGPLGVPKPGMFRGLFPSGFPAFLFAPLAAAFLGEPRGGPPWPVFSQIVLFV

SEQ ID NO: 285269 - protein, 196 aa, Glycine max
  unsure (1)..(196): unsure at all Xaa locations
  Clone ID: PAT_MRT3847_99627C.1.pep
YLSYPCIHLFSTFSLITLFWILFGAGLKPFVTLFHWDLPQALEDEYGGFLKPEIVEDFRNYADFCFKTFGDRVKHWVTLNEPYGYSVNGYSGGNFAPGRCSNYVGKCPAGDSSPSPTLPPLNTCSSAVIARTNTAHQKGQIGVTIVTFFFEPKSNSDADRKAARXGLYVWLANPITFGXYPESMRSNKYSIIYDSL

SEQ ID NO: 285270 - protein, 145 aa, Glycine max
  Clone ID: PAT_MRT3847_99628C.1.pep
MGSSVGQVNVMQPACSNAASADSILSTKTEPILCFTGRQTQSNLSFSGVTGESSAGDYQDCGASSMLLMGEPPWFAPCPENSLQSANRSNAVMRYKEKKKTRMFDKKVRYASRKARADVRRRVKGRFVKAGDVYDYDPLSTTRSF

SEQ ID NO: 285271 - protein, 88 aa, Glycine max
  unsure (1)..(88): unsure at all Xaa locations
  Clone ID: PAT_MRT3847_99629C.1.pep
REAGYFRPLVQYLKEGSDMNKILMAKALSRLELTDHSKLSLGEAGAIEPLANMFSTGXLESKLSSLNALQNLSSMTENLQHLIRSGIA

SEQ ID NO: 285272 - protein, 97 aa, Glycine max
  Clone ID: PAT_MRT3847_9962C.1.pep
AAAASGNTVGLQKRQRLGRRKQATLYQLNLQNNWFCIASKFLAHKSQTCNLLLPFTSTRTSSPHTITTLAFTTPSLSPTIPLPLLASRPSHHVPRGL

SEQ ID NO: 285273 - protein, 85 aa, Glycine max
  unsure (1)..(85): unsure at all Xaa locations
  Clone ID: PAT_MRT3847_99630C.1.pep
MIRASPSNTKPVDEFRVYDARGNAVNLAAYRGKVLLLEAVTXQCGLANSNXTELNQLIDKYRGKGLRTLAYTVNQGGAEEPGSNE

SEQ ID NO: 285274 - protein, 75 aa, Glycine max
  Clone ID: PAT_MRT3847_99631C.1.pep
TRSLCHTLRGPVRRAEGLVWALGGPLLVLPASSSPTWDSIQGSEALPLLGAREETRGGAASPLRGNPACVSSSGT

SEQ ID NO: 285275 - protein, 88 aa, Glycine max
  unsure (1)..(88): unsure at all Xaa locations
  Clone ID: PAT_MRT3847_99632C.1.pep
FDATIEDEEASLCSFHLCCNSQAKNSHIKSLINWSNPPLFLSWNFPYQQFIFILAYFETIITSFLVLFFKYXIPNMQLFTEVPDLGFQ

SEQ ID NO: 285276 - protein, 48 aa, Glycine max
  Clone ID: PAT_MRT3847_99633C.1.pep
PSPVQPGALRPKLTIESLTSRAITNLPFDLASTRPNRQTTNKHSVFRP

SEQ ID NO: 285277 - protein, 40 aa, Glycine max
  Clone ID: PAT_MRT3847_99634C.1.pep
HAENQQVDQVEHGLDTHSSQGHPFLMVILKVFNALEIHLD

SEQ ID NO: 285278 - protein, 77 aa, Glycine max
  Clone ID: PAT_MRT3847_99635C.1.pep
KHLVRKKKKKKKKKKKKKKKKKKKKKEKKEGKKKKKTKKPGGGAQGAKLQRREWESPGATHVNHLTENPPPGRPFNS

SEQ ID NO: 285279 - protein, 126 aa, Glycine max
  unsure (1)..(126): unsure at all Xaa locations
  Clone ID: PAT_MRT3847_99636C.1.pep
KIVSVILAKEELAPDVXFEAIANMTDGYSGSDLKNLCVTAAHCPIREILEKEKKERSLALTENQPLPQLCSSTDIRPLKMEDFIYAHEQVCVSVSSESTNMNELLQWNDLYGEGGSRKMRSLSYFM

SEQ ID NO: 285280 - protein, 256 aa, Glycine max
  Clone ID: PAT_MRT3847_99637C.1.pep
TRPLPGAGVAACRKDNSSSQTPHGEKSENVHPVKGARPTLEDSVTGSQLGRSDTVEDGSLVAEKGTSSDLQMHPLLFQVTEDGNAPYCPLKFSSGTSSSFSFFSGSQPQLNLSLFHSSQQQSHIDCANKSLKSKDSTLRSGGIDFHPLLQKSDDTQSPTSFDAIQPESLVNSGVQAIANRSSGLNDKSNELDLEIHLSSVSGREKSVKSRQLKAHDPVGSKKTVAISGTSMKPQEDTAPYCQHGVENLSAGRCELA

SEQ ID NO: 285281 - protein, 72 aa, Glycine max
  Clone ID: PAT_MRT3847_99638C.1.pep
LLSIEKTRWLTLSPLPCQSNLRAGEHRRRHSASILWNVGALVGLWSLFNRYLNIYNKQVLKVYHLPLTVSTL

SEQ ID NO: 285282 - protein, 93 aa, Glycine max
  Clone ID: PAT_MRT3847_99639C.1.pep
MEDYKKNHPYQQQQQHQHQQEEEKEVVCEKMERYPRDLLQGFSISGQQQQQEQHEEDDEEVELNLGLSLGGRFGVDKNAKKKRLLRSSSVVGT

SEQ ID NO: 285283 - protein, 121 aa, Glycine max
  unsure (1)..(121): unsure at all Xaa locations
  Clone ID: PAT_MRT3847_9963C.1.pep
MGPKSFGKAFVVHYVTTFNTTGEIPLISRMXGYTLTFQGQXIHGSHSNVAKLTSLHFQQXQHPMISVDTQDSSVNCDMLSFGSGNXLQLCGNKYPLKFIRMCDLTPAPQGSYYVSNDIFRL

SEQ ID NO: 285284 - protein, 197 aa, Glycine max
  Clone ID: PAT_MRT3847_99640C.1.pep
MLQSPGHSPLHISSPSPSISQVSAQNPNDPPSSSCAKHPAVLDEDTYVEALEKIIERDYFPDISKLRDRLDWLEAIKTGDPVVIREAQLKILERRAGTTKVTNPNDASRTTSHTPGSTFVRNFTPFDEFDGKPSQTPRAPVPEAKEGENNDGGVDTSLGLDQFMRRYTSEDNHSFSKNLKKVNKKRTERFGFLNEDV

SEQ ID NO: 285285 - protein, 191 aa, Glycine max
  Clone ID: PAT_MRT3847_99641C.1.pep
MLQSPGHSPLHISSPSPSISQESAQKPNDPPSSSCAKHPAVLDEDTYVEALEKIIERDYFPDISKLRDRLDWLEAIKTGDPVVIREAQLKILERRAGTAKVTNHNDTSRTTSHTPGSTFVRNFTPLDEFDGKPSQTPRAPAPEAKEGENNDGGVDTSLGLDQFMRRYTSEDNHSFSKILEKVNKKRKEGFG

SEQ ID NO: 285286 - protein, 114 aa, Glycine max
  unsure (1)..(114): unsure at all Xaa locations
  Clone ID: PAT_MRT3847_99642C.1.pep
FDARVWVYVHGLLTPDSIDDTEQKLHYIFEWFHISLKRMVAXGVPGVTDALFLDRQSVLAQEKNKLVDTAMLYNXGLWGKDYXSSKAHAEHLKLPGHYDHACERTSDPNEKAII

SEQ ID NO: 285287 - protein, 56 aa, Glycine max
  Clone ID: PAT_MRT3847_99643C.1.pep
HLTLLPGLMIYLSRGLDNYDNPHWNVLWLTGITDLQILPSLIAQSETSLSTQPQIL

SEQ ID NO: 285288 - protein, 50 aa, Glycine max
  Clone ID: PAT_MRT3847_99644C.1.pep
KLILKLILNNEKVLIHSAFLFSSLTSVGKLMQTDLNLVTETKRISVQINK

SEQ ID NO: 285289 - protein, 160 aa, Glycine max
  Clone ID: PAT_MRT3847_99645C.1.pep
FSVNPFEILRSLSKLLSLDIGGNLFHGVVKEDDLANLTSLMGFVASGNSFTLKVGPNWIPNFQLTYLEVTSWQLGPSFPLWIQSQNKLQYVGLSNTGIFDSIPTQMWEALSQVSYLNLSRNHIHGEIGTTLKNPISIPTIDLSSNHLCGKLPYLSSGVFK

SEQ ID NO: 285290 - protein, 67 aa, Glycine max
  Clone ID: PAT_MRT3847_99646C.1.pep
RFKEFMASKGLDAVQTEVKDMDWESTFHLRHLPESNISEIPDLIDEYRKVMKDFALRLEKLAEQLLD

SEQ ID NO: 285291 - protein, 38 aa, Glycine max
  Clone ID: PAT_MRT3847_99647C.1.pep
FILCFLFCSILIIETRPKLVQGFVLFPCAMNAFAFVET

SEQ ID NO: 285292 - protein, 38 aa, Glycine max
  unsure (1)..(38): unsure at all Xaa locations
  Clone ID: PAT_MRT3847_99648C.1.pep
RFFQAEYFRHLLKPVKVXSXXLFXRVXVKAGGLVVFLV

SEQ ID NO: 285293 - protein, 112 aa, Glycine max
  unsure (1)..(112): unsure at all Xaa locations
  Clone ID: PAT_MRT3847_99649C.1.pep
SFDLFAECSQDCEVCNPGXSNSMCMSFNPKPCLNAWRLLXCKRTGFHCYIMCVTECNAPTMQDAQVAIAWSMTSQPRVRSTXCVAYPQHPCVFHGCMGKLPFPPTRPRTRRQ

SEQ ID NO: 285294 - protein, 188 aa, Glycine max
  Clone ID: PAT_MRT3847_9964C.1.pep
MADSTKYIPIGGTLKSNLKTLFPIFKTRKTLTFAYAFSFTFVAFTVFLAFCPSPNTSSPFFTNIFSSTATTTSSASSYKSQLSSIFSFFFHNSTTPSSNSSSSTFNTNTTRSSNSTSQSPQTSKKTFKITPFENQTRTTPPPLTRKIPSDHVVTKEPSSANNNHTRVSDEAKAVKKTNQSSNGVVPAA

SEQ ID NO: 285295 - protein, 70 aa, Glycine max
  Clone ID: PAT_MRT3847_99650C.1.pep
IYIYISTYSSSSESWGNGCSQLSTQRSHLSPSKNLTLAALLNTKLKTLNRRSSIPRSLSISLFSSFVSRS

SEQ ID NO: 285296 - protein, 371 aa, Glycine max
  unsure (1)..(371): unsure at all Xaa locations
  Clone ID: PAT_MRT3847_99651C.1.pep
MNTGLAAGAALLALLAITFSLLSPQTLFSPPEIPGSKDHLHAARLLHVTGAVGPESLVFDADGGGPYTGVADGRILKWEGEERGWTEFAVTSSNRSDCVRPFAPELEHICGRPLGLRFDKKSGDLYIADAYLGLKVVGSTGGLATEVVTEVEGQPLQFTNDMDISEDADVIYFTDSTTIFQRRQFMLVLLGGDKTGRLMKYHKSTKEVTILLRDLAFXNGVAFSKDGSFVLVAETTTCXILQLWLGGPKAGQVDTFAVLPGFPDNIRRNSEGHFWVALHAKRSPFAKWVSSNPWVGKALLKIGFNFKQLHTSFAGWKPHAAAVKLSDKGEILEVLEDCDGKTLKFISEVEEKDGKLWIASVLMPFIGIYGL

SEQ ID NO: 285297 - protein, 56 aa, Glycine max
  Clone ID: PAT_MRT3847_99652C.1.pep
ENRRSEMENSCTLVVHFDKGTPALANDINEALERNDVPAKIDALKKAIMILLNGET

SEQ ID NO: 285298 - protein, 207 aa, Glycine max
  Clone ID: PAT_MRT3847_99653C.1.pep
GGGWCNNIESCLDRKDTRLGSSKQMEDIYFSGILSNEQQFNPDFYNWNRVKVRYCDGSSFTGDVEEVDPTTNLHFRGARIFSAVIEELLAKGLERAENAILSGCSAGGLTTILHCDSFKTFLPSRANVKCVPDAGYFVNVEDISGAHFIQQYYSEVVSTHGSAKNLPTSCTSKLSPTLCFFPQYVASHISTPIFVVNSAYDSWQIRY

SEQ ID NO: 285299 - protein, 396 aa, Glycine max
  unsure (1)..(396): unsure at all Xaa locations
  Clone ID: PAT_MRT3847_99654C.1.pep
MEITRIGQWLSLLICVLLLLQTEGVPVGITFVENAVAKGAVCLDGSPPAYHFHKGSGAGINNWIVHFEGGGWCNNVTTCLSRRDTRLGSSKKMDTSLSFSGFFSNSKKFNPDFYDWNRIKVRYCDGSSFTGDVEAVDPKTNLHFRGARVFAVVVEDLLAKGMKNAQNAIISGCSAGGLASILNCDRFKSLLPATTKMLGYFVNVRWISQGTRXIEEFYSEVVSTXGSAKNLPXSCTSKFSPELCFFPQYVASHISTPIFVVNAAYDSXWQIQNIFVPGSADPSDSWHSCKLDISNCSPDQLSXMQDFKSEFEKAVXCVGDSSSKGMFIDSCYAHCQTESQETWYKSDSPQLANTTIAKAVGDWFYGRSSFRHIDCAYPCNPTCHNRIFDQNERPDV

SEQ ID NO: 285300 - protein, 52 aa, Glycine max
  unsure (1)..(52): unsure at all Xaa locations
  Clone ID: PAT_MRT3847_99655C.1.pep
PXSEFPGRPTHPYTRPNTTELFSKGASQKHKAAFLTCEIILITPTYSKTPPT

SEQ ID NO: 285301 - protein, 70 aa, Glycine max
  Clone ID: PAT_MRT3847_99656C.1.pep
ITQGLIHNDLMSATNICYSALQLIQSNAEDNLLRMNTYMDSLPNTESIIKVYITLSHTFYTNSFLSFIKI

SEQ ID NO: 285302 - protein, 64 aa, Glycine max
  Clone ID: PAT_MRT3847_99657C.1.pep
PLVLKKKKKKLFLKKKKKKNREELNKKKRRRKKKKYNKKGPPFKKPKFTYPSLKLNIFFLLPQK

SEQ ID NO: 285303 - protein, 37 aa, Glycine max
  Clone ID: PAT_MRT3847_99658C.1.pep
SNMHPRKWRWLVGFASKLFLVKNYLLESMIVCSLCQK

SEQ ID NO: 285304 - protein, 83 aa, Glycine max
  unsure (1)..(83): unsure at all Xaa locations
  Clone ID: PAT_MRT3847_99659C.1.pep
XXXXXXXLXXXKTTTXPDXXRAXWAVXWGISSXASXXFGLSWYRXXXXCRPRGXAXXXXXXXGSXSSXYXLEPNSELTYXXXX

SEQ ID NO: 285305 - protein, 67 aa, Glycine max
  Clone ID: PAT_MRT3847_9965C.1.pep
VSELCWLSLLIFVLCGVPAFALSLPVGSHSLWLAPLTSIQINIFGPLCPQKKPFWLGSLNSPILPSP

SEQ ID NO: 285306 - protein, 190 aa, Glycine max
  unsure (1)..(190): unsure at all Xaa locations
  Clone ID: PAT_MRT3847_99660C.1.pep
MTFSAILSISYTPQSSIFCTQKSNPLSLKTLLFPPQVGKKLVHQPLRYKGFSPKGDVGKIKASIKWEKGYKKVEISSKEHLAVSLAYDVAQLSNKFTRERGAFTVVLSGGSLIKYLRKLLEPPYIDSIEWSKWHVFWVDERVVPKDNLDSYYKLAYDGFLSKVTXSXVNVYAIDDALAADGAADVYETTL

SEQ ID NO: 285307 - protein, 88 aa, Glycine max
  Clone ID: PAT_MRT3847_99661C.1.pep
LSLQLLIFFRELFMIVKCWSYSYAAFCVPQATARSSENAESSARSGICVFSRSVDWLIQLRKLGMTLLMSMLCLFENYHTSYNCRNDV

SEQ ID NO: 285308 - protein, 38 aa, Glycine max
  Clone ID: PAT_MRT3847_99662C.1.pep
DTHNHIALLNPSHPLWHLGLSQSSSTSYLILRWTISMP

SEQ ID NO: 285309 - protein, 67 aa, Glycine max
  unsure (1)..(67): unsure at all Xaa locations
  Clone ID: PAT_MRT3847_99663C.1.pep
MMIARFPLLSLGVVFLASVSVSSGIAYXGKQNPSHNKCLRSCNSEKDSYRSQAWHARCNLHKVEEEE

SEQ ID NO: 285310 - protein, 50 aa, Glycine max
  unsure (1)..(50): unsure at all Xaa locations
  Clone ID: PAT_MRT3847_99664C.1.pep
FFFFKTNYEQLKYYICCKLNRITVTVNVLCKXIDQFSFKSIFCMKKIYIT

SEQ ID NO: 285311 - protein, 37 aa, Glycine max
  Clone ID: PAT_MRT3847_99665C.1.pep
VVNEFHFVSAISFGHEDAEVVIVSVNAKVARHQPPVR

SEQ ID NO: 285312 - protein, 79 aa, Glycine max
  Clone ID: PAT_MRT3847_99666C.1.pep
HVIDTAPWTGWLRIAASLLQSLIFLTTITVVALGATSSAAIERQWDLPYLEQTGQTPLPQTSYTSTHEMKVRIQLVCFY

SEQ ID NO: 285313 - protein, 44 aa, Glycine max
  unsure (1)..(44): unsure at all Xaa locations
  Clone ID: PAT_MRT3847_99667C.1.pep
GTNSVIGSAVRAQESQMLAALKQREQXFGGLRAXVMXEKGEELA

SEQ ID NO: 285314 - protein, 62 aa, Glycine max
  Clone ID: PAT_MRT3847_99668C.1.pep
QYRLPFSDYIYGLVQMYDHAGYHPSGQLYCVPVRCNVWSSKIKSPVGVYLYACHFSFTFDHP

SEQ ID NO: 285315 - protein, 110 aa, Glycine max
  unsure (1)..(110): unsure at all Xaa locations
  Clone ID: PAT_MRT3847_99669C.1.pep
MQLGTGREIITASLISLHRKGAYLKMWRVGITTQKRGILEVYFQYQNVRFMWLICFSQSSGDLTLNVYEEDCEFAHPAGSFKGIQXLKRNXTNFGSLMENSNMQLMKWEG

SEQ ID NO: 285316 - protein, 72 aa, Glycine max
  Clone ID: PAT_MRT3847_9966C.1.pep
IIILDLTSKTQRHRVFYYKHILHSLFFLFSSSSIHNFNSIISLHPIKLRPICMTRLCSHCTNNRHNSRTCPS

SEQ ID NO: 285317 - protein, 151 aa, Glycine max
  Clone ID: PAT_MRT3847_99670C.1.pep
ARAGLEEHLVCCEALERVHLHKCQVRDRNAVGALFSVCRNAREIVLQDCWGLDDATLSLAVVCRRVKLFYVEGCSLLTTEGLESVIEHWKELECLRVDSCKNIKDSDISPELATLFSTLKELKWRPDTKYLFESDVGVSMGKKGGKFFKRT

SEQ ID NO: 285318 - protein, 194 aa, Glycine max
  unsure (1)..(194): unsure at all Xaa locations
  Clone ID: PAT_MRT3847_99671C.1.pep
MGKAPCCEKHGVRRGAWTPEEDQALVDYIQKHGHGSWRSLPKHAGLLRCGKSCRLRWINYLRPGIKRGPFTSEEESTIVQLHGMLGNRWASIASQLPGRTDNEIKNFWNTHLKKRLLRSCHSQRAKQLCVIPDQSIVKSESPSTRHMVQWESVRVETEARLSLESTMLNSWPTSKTCPDHFLXLWHSEVGKSFA

SEQ ID NO: 285319 - protein, 542 aa, Glycine max
  Clone ID: PAT_MRT3847_99672C.1.pep
MCCCTWPTCNSSWMKMEPSGSAFQNSGSSRALNSSGVSDRNQRVHCPQRNPFLGEASQDSGFRKERDRFLLAQGGQPKNLGGGFSGLCEDEVEVDPFFCAVEWGDISLRQWLDKPERSVGAFECLHIFRQIVEIVSVAHSQGVVVHNVRPSCFVMSSFNHISFIESASCSDTGSDSLGEGLNNQGGEVKTPTSLCPHDMPQQSMGSEDFMPVKTLTTPAQSDSSCMLSSAVYAARASLIEEPEENKMKDRRKDDEVEGKKQSFPMKQILLMEMSWYTSPEEGAGESSSCASDVYRLGVLLFELFCPLSSREEKSRTMSSLRHRVLPPQLLLKWPKEASFCLWLLHPDPKGRPTLGELLQSEFLNEQRDDTEEREAAIELRQRIEDQELLLEFLLLLQQRKQEVAEKLQHTVSFLCSDIEEVTKQHVRFKEITGAELGSDEHSASSFPSMTVVDSEGSAFLGTRKRVRLGMDVKNIEECVDDVGDDQKSNGSFLSKSSRLMKNFKKLESAYFLTRCRPAYSSGKLAVRHPPVTSDGRGSVVMT

SEQ ID NO: 285320 - protein, 84 aa, Glycine max
  Clone ID: PAT_MRT3847_99673C.1.pep
HTRPEEYKGCFPISLVFQGQGISLNWTGWGYQFPWFGRSKEIGSFWVGVSGPCVVGVFLVVMLTSFFFFLLYIFVSFLLNLMFF

SEQ ID NO: 285321 - protein, 202 aa, Glycine max
  Clone ID: PAT_MRT3847_99674C.1.pep
GSSSSRFGSRDVTEVAALYHSEKSHKTVEYSDYSFSDANGDKGHSSNEKIHEKNDTHSTSRSSVSEKDQLSTGGSYHWEDWHTDLLACCSEPCLCIKTCFYPCGTLSKIATVANNRPISSAETCNELMAYSLILSCCCYTCCMRRKLRKMLNIRGGFIDDFLSHLMCCCCALVQERREVEIHGVEGPENTNTRPPPSQYMES

SEQ ID NO: 285322 - protein, 682 aa, Glycine max
  unsure (1)..(682): unsure at all Xaa locations
  Clone ID: PAT_MRT3847_99675C.1.pep
HASVHLFCIQSWARQASDLAAARAATRLPISPATASASALWNCPKCRSEYPKSHIPKTYFCFCGKIENPPNDPWILPHSCGEVCGRPLKHSCGHHCLLLCHPGPCPSCPKLVKVRCFCGCLEDVRRCGFKEFSCNKPCSKFLDCGVHRCIELCHPGACPPCRTRGVHACQCAKVKEERECCDRVFQCGNPCEKRLGCGKHVCERGCHSGKCGECPLKGKRTCPCGKRVYEGMPCDAPVQLCGATCDKMLPCGYHRCPERCHRGQCVETCRVVVKKSCRCGSLKKDVPCYQDLACERKYAAGSFDVRTINALLHAIXRALCSLPNNGDNFMCMWRDTCHGAKPPPNPEFTLKPKKKKIIQQSESVPGTPCPPCPELVWRSCVGKHIGAERMMVCSDKSQFSCENLCGNPLPCGNHYCTKTCHALENQLQGSQPCEDCYLSCQKRXPACPHHCPRRCHPGDCPPCKVLIKRSCHCGAMVHVFECLYYNGLSAKGQETVRSCGGPCHRKLPNCTHLCPETCHSGQCTNAEKCCKKVTVRCKCHTLKKEWVCQDVQAAYHLAGCHPRDIPKNQFGIGLIPCNSDCNSKVQVVESELQLRKTRVTEVQEPDVEKSVRKRRKRREQVLESKETSKLQKIISRMKRLLLFVFILVILLAATYYGYKGLLWLNDWMNEVDERRQRYSRIK

SEQ ID NO: 285323 - protein, 28 aa, Glycine max
  Clone ID: PAT_MRT3847_99676C.1.pep
VDGVISSCICKDNRVSLPAFRRVLCINQ

SEQ ID NO: 285324 - protein, 212 aa, Glycine max
  Clone ID: PAT_MRT3847_99677C.1.pep
MSLWQPQERYLACERKCQRMRDCGRHACKRRCCDGDCPPCSEICGRKLRCKNHKCPSPCHRGPCAPCPIMVTISCACGETRFEVPCGTEMDNKPPRCPKPCPITPLCRHASNIKPHKCHYGACHPCRLPCAKEYQCGHTCKLRCHGAKPPPNPEFTLKPKKKKIIQQSESIPGTPCPPCPELVWRSCVGKHIGAERMMVCSDNHSSPVKFMW

SEQ ID NO: 285325 - protein, 84 aa, Glycine max
  unsure (1)..(84): unsure at all Xaa locations
  Clone ID: PAT_MRT3847_99678C.1.pep
SSLRSRPLARRLGFAAADPLLAANVAARVAPVRGGKGARGVVSMAMKSAGELTSADLTGIKVFTRSDHXHPLVDNQSIADNARD

SEQ ID NO: 285326 - protein, 44 aa, Glycine max
  Clone ID: PAT_MRT3847_99679C.1.pep
RGNIYLRTFSKNKLEAGGGRSTGSKLSYACMRHHNSSIMSPLFI

SEQ ID NO: 285327 - protein, 63 aa, Glycine max
  Clone ID: PAT_MRT3847_9967C.1.pep
LTRMCHEGGGERKQGLWSTLMMGQQFIFTPACCIPCYVEEPTTEKKAGRCFQWLNCSYRTQGV

SEQ ID NO: 285328 - protein, 77 aa, Glycine max
  Clone ID: PAT_MRT3847_99680C.1.pep
EAETKTHSLDKPRDAEWPAGIDSIGDHDAYAYAGLGKVRVVVILRWRCIWQPFHQQEHFIHVTGRWRMCSIRYLLSV

SEQ ID NO: 285329 - protein, 197 aa, Glycine max
  unsure (1)..(197): unsure at all Xaa locations
  Clone ID: PAT_MRT3847_99681C.1.pep
MKVLIALCLLAVVTQISCWSEDLVQTEGGLVRGVVQDVYRSFKGIPFMAPPVGELRWAAPQPKAPWSPAVLDASQYSAGCPQNCVLPNMTCPVFISEDCMYLNVFTPRVSQMTSKVPVMVFFPGGHFDQGAAGTDLYNGGYMVNRSNVILVTTNYRLGVLGWIXTGTMKGNYXFQDQLAALSWVQRNIANFGVIQHK

SEQ ID NO: 285330 - protein, 75 aa, Glycine max
  Clone ID: PAT_MRT3847_99682C.1.pep
ALRAGPYPEREMRDRATKRQTIEDPADMGIKADAAFPGVDEGAPPGAPIVAVPNVGKGPGTTTGVANSPQLAGPG

SEQ ID NO: 285331 - protein, 43 aa, Glycine max
  Clone ID: PAT_MRT3847_99683C.1.pep
YFFVKNHLISTPYPLLTYLPNSTQLHFNLITFLTHFISLSVNF

SEQ ID NO: 285332 - protein, 85 aa, Glycine max
  Clone ID: PAT_MRT3847_99684C.1.pep
LVKKSAADHVYKFEYHLYSILIYPFSLPTKISLFSTSFYPKMGVFSNSCDSSVIGRSTTNPAYQHTLKLVFTCLGPYVFRSTSSN

SEQ ID NO: 285333 - protein, 74 aa, Glycine max
  Clone ID: PAT_MRT3847_99685C.1.pep
YCHRLLPLPSPAPCMALLIMHSTLISILSLNVYLFVVLMAFCCYRSFPYPSFSRAALFPLCPTLLFIVSPPPPQ

SEQ ID NO: 285334 - protein, 585 aa, Glycine max
  Clone ID: PAT_MRT3847_99686C.1.pep
EERSSEYEPVLVQEMLTLIIQIVKERRFSGLTTAECLKRELIYKLSIGDATHSHLVNGRGRDLTKFEQLQDILDTVAVYSNPSGFNQGMFSLRWSFWKELDLYHPRWNSKDLQVAEERYLRFCSVSALTTQLPQWTKIHPPLRGIARVATCKVVLHIIRAVLFYAVFTFKSSESRAPDSVLLPALHLLSLSLDICFQQKESSENTCHDVSHLPIIALSGEIIESSFGEQSLLSLLVLLMEMHRKENVDNFVEAGGCSLYSLIESLLKKFAEIDNRCMTKLQKLAPEVVSYISEYVPTRDSSVSSSASDSEKRKAKARERQAAIMEKMRTQQSKFLASIDSTVDDSSQLGHEGDLDTEQDAEEFDSKQVVCSLCHDHNSKHPISFLILLQKSRLVSSVHRGPPSWAQLCRSDKDHTPIINTKETDTLPMNCNSVSSGSTSSSHLSQFVQNAAKELASCGKPGEVLTFLQYVKNKFPALSNFQLPDTYYHDKENTPYTFETLEQGMYFSVRDEMHDLLLSSNLLNEDEKVSTVGGNSNFIIDTGSVLLGKYTADLVQEMSEVSSVSENASNETGSVESTSQHPAYDG

SEQ ID NO: 285335 - protein, 48 aa, Glycine max
  Clone ID: PAT_MRT3847_99687C.1.pep
LHHSAGPFKISNFHCPKTQLNAFFMDTLNEIYSAGNYTIDFPEILNFT

SEQ ID NO: 285336 - protein, 98 aa, Glycine max
  unsure (1)..(98): unsure at all Xaa locations
  Clone ID: PAT_MRT3847_99688C.1.pep
REEQERGXNACSIQCLMTENNLSDENVARKHIRQLIQNLWPELNGLAMTTTALPXSVMKASLNMARTAQVIYQHGDDQNTFTVDDYVKTLILTPSSNY

SEQ ID NO: 285337 - protein, 93 aa, Glycine max
  Clone ID: PAT_MRT3847_99689C.1.pep
IPKILGPLSMAPTHYINIDKLERGRIWREGLWRYSSFTTPRGDLHTYHAANDTAGKLEYIGRWFEIYSEIQLTCMICLSVILALLNYRCWMRN

SEQ ID NO: 285338 - protein, 64 aa, Glycine max
  unsure (1)..(64): unsure at all Xaa locations
  Clone ID: PAT_MRT3847_9968C.1.pep
CNSIKTNNLPNPRLESSYTALAIQARSRRSACNSVLQLNCRTIMTQNFQVLVTQXLCVSNSFPR

SEQ ID NO: 285339 - protein, 76 aa, Glycine max
  Clone ID: PAT_MRT3847_99690C.1.pep
DAWADAWADAWAIFSTFSTAVAPKCAFINSLFIAFTALRFTSFSLLIEDNNFQRSYLQGSLPGGGSSNFSSNMHGM

SEQ ID NO: 285340 - protein, 46 aa, Glycine max
  Clone ID: PAT_MRT3847_99691C.1.pep
IDQLLPFQIFFCPSHSFFLVATSLLQIMHIKLTALSKYLIPSNLIT

SEQ ID NO: 285341 - protein, 58 aa, Glycine max
  Clone ID: PAT_MRT3847_99692C.1.pep
TVPANSMDYHCTSLSQTQSHAQTQTCCLQYTDKILIYYSMSKTLWLFHKGLPVFHLCS

SEQ ID NO: 285342 - protein, 105 aa, Glycine max
  unsure (1)..(105): unsure at all Xaa locations
  Clone ID: PAT_MRT3847_99693C.1.pep
DLETSLLLMIKTFALIIGRXPWRMLIAHAGTVSPLHVLVLEKTTSPPTGFLTCARLGLNSLFQQIIHYRVSPHQKHLLYITNLTLTIDHNHTTDIPEVVYLDIYK

SEQ ID NO: 285343 - protein, 124 aa, Glycine max
  Clone ID: PAT_MRT3847_99694C.1.pep
NFFIIVFFFFAANVFGKPKTNTDFLSYNGNGFKLSIPSKWNPSKEVEYPGQVLRYEDNFDSTSNVAVMVTATDKKSITDYGSPEEFLSQVDYLLGKQAFFGQTDAEGGFDSNAVATANILESST

SEQ ID NO: 285344 - protein, 399 aa, Glycine max
  unsure (1)..(399): unsure at all Xaa locations
  Clone ID: PAT_MRT3847_99695C.1.pep
MAAKKHDAGDTKKRKRLNTETHEAPKASKLVASKKHKPDSVAKDNKNKKTAPLTGRERRLHSKELADARKKKRKRHFTLEQELARLWEKMRRHEIAKEDRAKLVTEALQKMKGKIPEIAGSHISSRVLQTCVKHCSQAERDAVFEELRPHFLTLAFSAYAVHLVKKMLDNASKKQLAGFISTLRGHVAPLLRHMVGSIVVEHAYELANAAQKQELLSELYSTELQLFKDLVSLKESRLSDVMSKLGLQKGSVLRHMTSVIQPILEKGIVDHSILHRVLLEYFSIADKSSVTDIIQQLSSPLIVRMIGTRDGAKIGILCVKYGNATXERKKIIKGLKGHIDKTAYHQYGCMVLVCILSVVDDTKLITKVIIRELQSILKELVLDKVYYILSSFHTLHMNI

SEQ ID NO: 285345 - protein, 69 aa, Glycine max
  Clone ID: PAT_MRT3847_99696C.1.pep
RGFWGGTHYNYGSYLLLFGFLPCYRGCQQRVTVVDIRDQPFFGSGVYISWWRVHSRYNMLLPGQTGLGS

SEQ ID NO: 285346 - protein, 96 aa, Glycine max
  Clone ID: PAT_MRT3847_99697C.1.pep
YRNDAGPAHATISISDLTNRGGVNAERGRGVTILFGWSWNSEELGRSLYDRWLLLEFVVPVIVICVCFVVFCLRFLSHICYMGSFVNILFWILFYV

SEQ ID NO: 285347 - protein, 39 aa, Glycine max
  Clone ID: PAT_MRT3847_99698C.1.pep
VRANFTMGYWASTILVLSCVEHLLLLVCESSVASDGNIV

SEQ ID NO: 285348 - protein, 54 aa, Glycine max
  Clone ID: PAT_MRT3847_99699C.1.pep
LLRTMTSNVTSQFIYIYIYGGLLWVAKLALLVHQKNRLALPEVSLNQGMPFMND

SEQ ID NO: 285349 - protein, 50 aa, Glycine max
  Clone ID: PAT_MRT3847_9969C.1.pep
GSHPRVNTPEDSSPTPKGSPKDHTLGNPENHSITMKKAETSTNHRFLSLV

SEQ ID NO: 285350 - protein, 66 aa, Glycine max
  Clone ID: PAT_MRT3847_996C.1.pep
PAPYMISSSRFTVAEGLTHDINARPFGRWPKYLSRSRHNCFVSPETKIYGLPTICFNLKTPTSSKE

SEQ ID NO: 285351 - protein, 117 aa, Glycine max
  unsure (1)..(117): unsure at all Xaa locations
  Clone ID: PAT_MRT3847_99700C.1.pep
IFPKRKRTHSDTNIDGKTYCDTPRGIQNGVRRKFKGCTMGPTIVPGLDYRTRHYTPHGFKNGVENIVKDXELVMMHNMTHXAENGHKIATRKRTDMGERIAQRAVVVTNITANIPTP

SEQ ID NO: 285352 - protein, 398 aa, Glycine max
  unsure (1)..(398): unsure at all Xaa locations
  Clone ID: PAT_MRT3847_99701C.1.pep
MKWLNKLFRGGPNRGRGGRHLHEPAEESRVWGAPSRALDDRARAQKEKEDLGHAMALSSAEDLKRPNAHQGYNWGEDTGDDYSKAPRDTLNSSAHPPFAPTPFYPHPHKYRRICGGCNQEIMYGNCLGCMDTYFHPNCFRCHSCGYPITELCFQFIPINAAGLIEYRCHPFWSQXYCPSHEYDNTARCCSCERLEPLNIKYYRLEDGRSLCLECMESAIMDTGDCQPLYHSIRDYYEGMQMRIDQQIPMLLVEREALNEAIVGEKNGAILAHELMHAWLRLNGYRNLNPEVEEGICQVLSYMWLESEVMPSFQNMPSTSTSAASSYSSSKKGAKSHVENKLGEFFKNQIANDSSPAYGGGFRAANEAVNRYGLRRTLDHIHWTGFFPVEKERKFFKYG

SEQ ID NO: 285353 - protein, 47 aa, Glycine max
  unsure (1)..(47): unsure at all Xaa locations
  Clone ID: PAT_MRT3847_99702C.1.pep
XSEKTPEGEHVASAAIESRYRQRRQVCISAPHKRTFTTDYTMSGEVR

SEQ ID NO: 285354 - protein, 188 aa, Glycine max
  Clone ID: PAT_MRT3847_99703C.1.pep
MKLRLRSLESKETLKIEVPDSCCSLQQLKDTVSRTISSSSSSSSSVHLSLNRKDEIHAPSPDEPLQSLGVAAGDLIFYSLNPTAFSLETLPHKPETAPLDGPSIQDSPETLASDAPSVPNAEKPPTLDAAELEPMEMIDGSDETVVVGTNSEPFFVRRVLKEALGNNVNDFKLLVFMVHGVVLESGFV

SEQ ID NO: 285355 - protein, 168 aa, Glycine max
  Clone ID: PAT_MRT3847_99704C.1.pep
MKLRLRSLESKETLKIEVPDSCSLLQLKDTVSRTISSSSSSLHLSLNRKDEIHAPSPEEPLHSLGVAAGDLIFYSLNPIAFTLETLLHKPETASRDGPSIQDSPETLASDSPSVPDAEKPPTLDAAELEPMEMIDGSDEMVVVGTNSEPFFVRRGSRSAWDHVNEFKY

SEQ ID NO: 285356 - protein, 75 aa, Glycine max
  unsure (1)..(75): unsure at all Xaa locations
  Clone ID: PAT_MRT3847_99705C.1.pep
GMVTHIIMTFGLGYTTTAERAKPRKGSLETIEPIAMACTARANMMPEDRXCGGSMNATHSFGPAVGSGDFHDNWM

SEQ ID NO: 285357 - protein, 54 aa, Glycine max
  Clone ID: PAT_MRT3847_99706C.1.pep
QQNLDEIIHGHANQSLQVFSHMAHNFEKPSNTQDSKRRLGGSNEFVYIKEFSHH

SEQ ID NO: 285358 - protein, 437 aa, Glycine max
  Clone ID: PAT_MRT3847_99707C.1.pep
LRLAAAREQSQSAQEEAEEWKRKYDIAVREAKAALEKAAIVQEYTNKQSQLREDALREEFSSTLAEKEDKIKEKTAKIEHAEQCLTTLKLELKAAESKIRNYESEISPLRLEIKKLIERLKTENARAQSYEKDVMVIQQEINHLKEKYNTECIKFEEVQERCQIAEKEAVRATEVADKARAEANLAQKEMSEMQRLAIERLAHIERAERKIENLEREKDNLEGELQRVRDSEKDALVRVSTLEEKVGQREKDIDSLLEKDGTQRRNSTQILDQLLETEREACAQANSRADSLSLQLQSAQAKIDSLHQELTKFQLNETILDSELKTASRGKRLRVDDIGVESGQDMDSSPRILRGTKRSKSTSSPLKFSHLEDVSSIGGDEDNYSQQTNEDDYKKFTIQKLKQELTKHNYGDQLLELKNPNKKAILALYEKCVLQKS

SEQ ID NO: 285359 - protein, 85 aa, Glycine max
  Clone ID: PAT_MRT3847_99708C.1.pep
PLSLPLRCLLPCCTGYGTSYTHVLRSLYVGCNHLGLSRKGSGGWGPFTSCTPFCIVFHLILPKLIKQCILHIWCIYRLYSTTTQT

SEQ ID NO: 285360 - protein, 72 aa, Glycine max
  Clone ID: PAT_MRT3847_99709C.1.pep
KTFLYQANISSTLTYIECLTFENHFFAVRDQQFAVSEDKKQKRTLQNTTNLESKLHQLFMTKMCLTTPRSTK

SEQ ID NO: 285361 - protein, 41 aa, Glycine max
  Clone ID: PAT_MRT3847_9970C.1.pep
HFRTRSLKVMHYILELELEKLKNGPKFLKGLELNLKNSDAW

SEQ ID NO: 285362 - protein, 48 aa, Glycine max
  Clone ID: PAT_MRT3847_99710C.1.pep
LRRIQVIGLSERMDLKHLVALQGNPAMIPRQYMHHSSVNGTLSWAMPH

SEQ ID NO: 285363 - protein, 54 aa, Glycine max
  unsure (1)..(54): unsure at all Xaa locations
  Clone ID: PAT_MRT3847_99711C.1.pep
QFVQXKLIFKRXLCVSEALYEXYKXXVICEEGKEXTGTXLHXXSISSRGSNIWH

SEQ ID NO: 285364 - protein, 53 aa, Glycine max
  Clone ID: PAT_MRT3847_99712C.1.pep
EVVCVYPPPFLNNEETRPCKLLGEFPLFILYMNWCFFFFVHDLNWIEFCNMYW

SEQ ID NO: 285365 - protein, 111 aa, Glycine max
  unsure (1)..(111): unsure at all Xaa locations
  Clone ID: PAT_MRT3847_99713C.1.pep
PPPPRPPPGPPRPAPPPPPPPPPRAPRPPPPPPHRPPPPPRPPPPSPPSPTAPPTPHPVGASPTVRPPQHXXRSTPRPNTPPISAPPRSPSTGFLYGSFGIQVMAKSLSLR

SEQ ID NO: 285366 - protein, 100 aa, Glycine max
  unsure (1)..(100): unsure at all Xaa locations
  Clone ID: PAT_MRT3847_99714C.1.pep
MASKRELSNPMREIKVQMLVLNIWVGESLDRITRAHKVLEQLNVQTPAFSKAMYTIRSFVIRTNEKIAFYITVKGYRAMQLXKSGSKVNEYELLIKNFND

SEQ ID NO: 285367 - protein, 137 aa, Glycine max
  Clone ID: PAT_MRT3847_99715C.1.pep
LLECREWWDGKSELSKKLLLNRLLEKDVGVDTMPPSFVNGQLKCEMRRERINAAKVRIKRIMHPSDADLGDAEIPCPLDSSYPERRRKKRKGMVVDDVDWEDLIIETLVLHRVKEEEIEKGHYNTLLDLHVFNSGIV

SEQ ID NO: 285368 - protein, 62 aa, Glycine max
  unsure (1)..(62): unsure at all Xaa locations
  Clone ID: PAT_MRT3847_99716C.1.pep
INNQRGKKGVLKKTNILCCGGAPLVKGVPFYKNPRLFSKEWWFVNXKKKKKKXXLRPPARVD

SEQ ID NO: 285369 - protein, 119 aa, Glycine max
  unsure (1)..(119): unsure at all Xaa locations
  Clone ID: PAT_MRT3847_99717C.1.pep
IPSPSVRCSFSPLSPQIYFLCIASMPSHSRILNHRHRSLPLHLSRRKRLSLPPTTSLVYSPRSRFDCASLELHPLIIPHNECCVLRNVAPTKAFDDDSFDIPMXDDWNADDSSSAYKLS

SEQ ID NO: 285370 - protein, 110 aa, Glycine max
  Clone ID: PAT_MRT3847_99718C.1.pep
ILKIPDMFQITDPITVQPFHRKRLRLSRGSRSSNIDRIDRNTLDPRILHSTSDLQGRVVGSQRTHQVEAGIEPSSHTTGGDNTHTAQRHGSTPSDRLAAARVTPGVAALA

SEQ ID NO: 285371 - protein, 105 aa, Glycine max
  unsure (1)..(105): unsure at all Xaa locations
  Clone ID: PAT_MRT3847_99719C.1.pep
AYTGVLKPRDRIMGLDXPHGRHVTHGFMTPTXRASGPSIYHAAMAHRLDESTSLIDYDMREKTATVVHSTLIAAGASAYPRDIDYTALRXIAAEVRALLMMDMAY

SEQ ID NO: 285372 - protein, 195 aa, Glycine max
  unsure (1)..(195): unsure at all Xaa locations
  Clone ID: PAT_MRT3847_9971C.1.pep
MFLFAWFYRNSSXLGLWQLEAKILFPGLDNAGKTTLLHMLKDERLVQHQPTQHPTSEELSIGKIKFKAFDLGGHQVARRVWKDYYAKVDAVVYLVDAFDKERFAESKKELDALLSDESLANVPFLVLGNKIDIPYAASEDELRYHLGLTNFHHXGKGKINLTDSNLRPLEVFMCSIVRKXMGYGEGFQWLSQYIK

SEQ ID NO: 285373 - protein, 126 aa, Glycine max
  unsure (1)..(126): unsure at all Xaa locations
  Clone ID: PAT_MRT3847_99720C.1.pep
PLHRPRRRQGRDPQNNEAHAQXETXXPKRPPDDAETPKGPTPXPKTXQPKKAPPKNTAGGTTPRSDPPANPPTEGNXRASAEPQRTXRXKGTTKKAATAGTPEKTGTPXARATNRPTRGRARPDTT

SEQ ID NO: 285374 - protein, 114 aa, Glycine max
  unsure (1)..(114): unsure at all Xaa locations
  Clone ID: PAT_MRT3847_99721C.1.pep
SSSINWWCLSSISRGDTSLRKATLLPSFFTTLNTPSSPSFSSSFPSLIQDMPVFAAPTPIITPTVRDDMANEYQKAIEEPQKSSMEKSELKATTXEKVEHITSFSKDIIHLMAF

SEQ ID NO: 285375 - protein, 84 aa, Glycine max
  Clone ID: PAT_MRT3847_99722C.1.pep
FFFLLLFRPAQNLSLVALCPFKFAFFSSKWTTQIVLLRLTGSCIFIFFSHRETFKGVVVLKDSFFDPWFQWRGVTMRKSTSPRK

SEQ ID NO: 285376 - protein, 62 aa, Glycine max
  Clone ID: PAT_MRT3847_99723C.1.pep
DHASTAKRRQKGKIFGNPHFFLLFLNQTITSEAFNFLITKMGCCYMKLCVLTTMILVLSLKK

SEQ ID NO: 285377 - protein, 86 aa, Glycine max
  Clone ID: PAT_MRT3847_99724C.1.pep
YAPGLSSLGPARAPLWGCRIIMLTLWFGALVDECHLRCVVLASCAVGAFVWIRVLMGRSVLGWCPPCWLKNPSVLLSEKRKLFKGK

SEQ ID NO: 285378 - protein, 169 aa, Glycine max
  unsure (1)..(169): unsure at all Xaa locations
  Clone ID: PAT_MRT3847_99725C.1.pep
GHSLGSALAMLTWTTIAKTGILIETYLCNHAYVSDHIERMKDKXLKHGLRXLGEYXTCGLAIAMKDKQKKSSCFDPSAAECAWDPSLFENPSDHICSEYVGYLEHRXKMEEIGAGNIEKLATHTIINCLLMGVLGKESDDTLPLMSSWSLTVNHTAINEITDTHGIHQW

SEQ ID NO: 285379 - protein, 105 aa, Glycine max
  Clone ID: PAT_MRT3847_99726C.1.pep
YFMRVENNGRKNHMVLKPTENQIHLSPPPTGKEKQSSLYCKVNNTIRTQVLINLQVKRTCRKGNLYETMRIRPYSRMLATKRRPLAMDKAHWLTDYIDGGSRNSG

SEQ ID NO: 285380 - protein, 71 aa, Glycine max
  Clone ID: PAT_MRT3847_99727C.1.pep
ELNDKKRLATTGANFARAYTVEFSSCKFPENFTGCQDLAKQKKVPFLSDDLELECEGKDKYKCGSNVFWKW

SEQ ID NO: 285381 - protein, 453 aa, Glycine max
  Clone ID: PAT_MRT3847_99728C.1.pep
MSLRYGSVVLVALVLLPHMASAASIVKNLPGYKGDLPFKLETGYIGVGEEEEVQIFHLFVESQRNPFIDPLLIWFVGGPGCSALSAFFFENGPLVMNENYNGNLPKLELNPYSWTHTLNMIYIDMPVGTGFSYSETQEGYYSSDILWVKHTYEFLQKWFIDHPKFSSNPFYIGGGSYSGMITGPLVQQVYEGYKARRKPLMNIKGYVLASPAVDGFREQNMKVLYAYQRSLIPEALYKSMKENCNGDYINIDPENTKCVSDYSVYVELVRYINEQQIMEPLCITTPGVNREILQEVQDPPTFWCRSYYHILVDTWANDENVRKALHVREGTKEEFLRCNRTMAYTTTRLNTVEFYRNLTNANLEALVYCADLDMNVPHLGTQYWINSFNTSIRDKWRAWFVDGQVAGYTEVHKTKEDHYLTYVIVKGAGHVAQTFKPKEVYHLINRWFSFSLI

SEQ ID NO: 285382 - protein, 110 aa, Glycine max
  unsure (1)..(110): unsure at all Xaa locations
  Clone ID: PAT_MRT3847_99729C.1.pep
LEHKLNIIRTREPLLDKPAVESIQSPDGDVIDCAVYYQPPASDHPMLKGHKPLVSPXWPIGYCQVDMTENSQSWTMLGESCSEGXTTTIRRTTEQDMLTATSASRFGRGL

SEQ ID NO: 285383 - protein, 103 aa, Glycine max
  unsure (1)..(103): unsure at all Xaa locations
  Clone ID: PAT_MRT3847_9972C.1.pep
TSHSLDEAKNCQAQMGNDLAKLEASATDVXLITVSTDDVDILSKVYVRDHYLTCIPISEIDYTVKCACSYIASGEISHPLSMNAQDTAIADVPDAVAYSILLS

SEQ ID NO: 285384 - protein, 271 aa, Glycine max
  Clone ID: PAT_MRT3847_99730C.1.pep
MGPHPNRRIIPLHQVGILIMRPRSLIMRRLRVATRPRYNQRVNEIANRTATLTMGSRYEVELKLSSARALKNVNWRHGPNRPYVVVWVDPSNKLSTRVDESGDTDANWDQTLTIPLPPKPLEDQTLYIDVVHAGSEEDTKPLIGSARLKLVDILDDVGIGERVSRTLSLKRPSGRPHGKVEVSVTIREPSYRAQGGYNAPPYGGSGYGYAPQEEKKKSKFGGMGTGLAVGAVAGALGGIALVEGAEYVEDKIEDDVAERVEDDLGYDGDDF

SEQ ID NO: 285385 - protein, 61 aa, Glycine max
  Clone ID: PAT_MRT3847_99731C.1.pep
PPRWGPWPRHFCNCCWAYNRWDFTPCVLKKVSKSFFSTPHFFFCQRPPSIKLGFCGLFPLL

SEQ ID NO: 285386 - protein, 41 aa, Glycine max
  Clone ID: PAT_MRT3847_99732C.1.pep
YICSTSLFRLMTLDIASHIEYILLKIKLSLIKTGHYPIPSP

SEQ ID NO: 285387 - protein, 76 aa, Glycine max
  Clone ID: PAT_MRT3847_99733C.1.pep
LIKFCIFCHSVLGLTIPLRPVSEHEKGNKMRYTIISHLNSWFGEIIRYDKLILLLYHILFPGQNFILWSRLEFNMI

SEQ ID NO: 285388 - protein, 76 aa, Glycine max
  Clone ID: PAT_MRT3847_99734C.1.pep
CDVFFFGWGVFLWAIIFKKNQAFTKGAKKHGRGYKNKGYPYKNLHRLMATKNNCPRVGQKKHIHNAFLTYQKKQRA

SEQ ID NO: 285389 - protein, 73 aa, Glycine max
  Clone ID: PAT_MRT3847_99735C.1.pep
KFFSKNSPKAPVPGGPCVGPRSPKTLEWGSPWFKNFFLFGWAPLGVFNSAYGPGGSQNFGAQNGTPLGPFLFV

SEQ ID NO: 285390 - protein, 351 aa, Glycine max
  Clone ID: PAT_MRT3847_99736C.1.pep
MDKYEAVKDLGAGNFGVARLMRNKETKELVAMKYIERGQKIDENVAREIINHRSLRHPNIIRFKEVVLTPTHLAIVMEYAAGGELFERICNAGRFSEDEARYFFQQLISGVHYCHAMQICHRDLKLENTLLDGSPAPRLKICDFGYSKSSLLHSRPKSTVGTPAYIAPEVLSRREYDGKLADVWSCGVTLYVMLVGAYPFEDQDDPRNFRKTIQRIMAVQYKIPDYVHISQDCRHLLSRIFVANPLRRISLKEIKSHPWFLKNLPRELTESAQAVYYQRGNPSFSIQSVEEIMKIVGEARDPPPVSRPVKGFGWDGEEDEGEEDVEEEEDEEDEYDKRVKEVHASGEFQIS

SEQ ID NO: 285391 - protein, 144 aa, Glycine max
  unsure (1)..(144): unsure at all Xaa locations
  Clone ID: PAT_MRT3847_99737C.1.pep
FAFLISYDNPGILAGLGCSASSQAKRGRGLELSRIQAHRGPDWSQLHQYGDHYLAHHRLAIXDPAHGEHPLFNADYTESVPVNGEIYNHEELMXQLPNDTFQTGCDXDVIAHLHEEHGDYYMDMLDGIFSAALLDSRDSMHIVA

SEQ ID NO: 285392 - protein, 84 aa, Glycine max
  Clone ID: PAT_MRT3847_99738C.1.pep
TGIRRGCHQILIFHSTFSVQSVEEIMKIVGEARDPPPVSRLVKGFGWEGKEDEGEEDVEEEEDEEDEYDKRVKEVHASGEFQIS

SEQ ID NO: 285393 - protein, 351 aa, Glycine max; identical to SEQ ID NO: 285390
  Clone ID: PAT_MRT3847_99739C.1.pep

SEQ ID NO: 285394 - protein, 80 aa, Glycine max
  Clone ID: PAT_MRT3847_9973C.1.pep
ADLVYHYHFNYSEKTRGSYSKKKKKKKKKKKKKKKKKKKKKKKKKKKKKKKKKKKKKKKKKKKGGGRFKRNKVKERGEGK

SEQ ID NO: 285395 - protein, 95 aa, Glycine max
  unsure (1)..(95): unsure at all Xaa locations
  Clone ID: PAT_MRT3847_99740C.1.pep
SFRLSFGGNKDIXEVGQQSMHYMQKLCAKKMCPNSLXKTQKRVIDSALTLVRENTKLRKELVREGKNTIATATLLRVPLGHNGSWLRKPTLCTSF

SEQ ID NO: 285396 - protein, 407 aa, Glycine max
  Clone ID: PAT_MRT3847_99741C.1.pep
MTSQNGDESHHPPPQAQAEKVTEVGWYVLGEDQQQIGPYAFSELCQHFLNGYLSENTFVWSEGSSEWQPLSSVSDLWAQINRQGPDSSTTVSAPDVDEFERWQKEIQEVEAQVEGSEFGSLSGNVGGTGAGEDSERPSTPPEGEEGFTDDDGTVYKWDRSLRAWVPQDYPTGSTKPYGVEEMTFLEEEEVFPTIPNSDASEKFEDSPKLSVSVPPLKEEENNTNVISGGKRMLSDQQTDKKEANKPPDSWFELKINTHVYVTGLPEDVTTDEIVEVFSKCGIIKEDPETKRPRVKLYVDKETGRKKGDALVTYLKEPSVALAIQILDGAPLRPGGKIPMSVSQAKFEQKGDKFVSKQVDGKKKKRLKMVEDTMLGWGGRDDAQVSISATDMLRYMFATAEMRADENL

SEQ ID NO: 285397 - protein, 239 aa, Glycine max
  unsure (1)..(239): unsure at all Xaa locations
  Clone ID: PAT_MRT3847_99742C.1.pep
SGIPGSTQRPNEANNTNVVSGEKRKLSDQQTDKKEANKPPDSWFELKINTHVYVTGLPEDVTTDEIVEVFSKCGIIKEDPETKKPRVKLYVDKGTGRKKGDALVTYLKEPSVALAIQILDGAPLRPNGKIPMSVSQAKFEQKGDKFVSKQVDNKKKKKLKKVEDKXXGWGGRDDAKVSIPATVILRYMFAPAEMRADENLRLELEEDVKEGVYKSLVLLDSVKICENHPQGVVFVKIQG

SEQ ID NO: 285398 - protein, 116 aa, Glycine max
  Clone ID: PAT_MRT3847_99743C.1.pep
IPRLHCFRLWAHLFYGEIETSIVIFTWKLVWIEHFLNGYLSENTFVWSEGSSEWQPLSSVSDLWAQINRQGPDSSTTVSAPDVDEFERWQKEIQEVEAQVEGSEFGSLSGHVGGTG

SEQ ID NO: 285399 - protein, 50 aa, Glycine max
  unsure (1)..(50): unsure at all Xaa locations
  Clone ID: PAT_MRT3847_99744C.1.pep
SIVHGSTARLFATLCHFCVAHXGSVLCSFANCNCFCVKLWPSWHLFFPQV

SEQ ID NO: 285400 - protein, 36 aa, Glycine max
  Clone ID: PAT_MRT3847_99745C.1.pep
KKKPMWSLISCHVHYRQVLLENKHHPWPCSPQSNIH

SEQ ID NO: 285401 - protein, 62 aa, Glycine max
  Clone ID: PAT_MRT3847_99746C.1.pep
MDKGPHSKPYTKKKRRYLELNTAITRAKHLDVRKGKTRPRDHKDVCSTQNTTAHANRAQHNT

SEQ ID NO: 285402 - protein, 56 aa, Glycine max
  Clone ID: PAT_MRT3847_99747C.1.pep
WRTKSERKIYYSAPKRANPSTTVKTVYFNHRKNDPLIPMVFVSSSLLTPELSNRPF

SEQ ID NO: 285403 - protein, 84 aa, Glycine max
  unsure (1)..(84): unsure at all Xaa locations
  Clone ID: PAT_MRT3847_99748C.1.pep
KSKKQLLSMNIDEILERAEKVEEKEAYGDQGNALLGAFKVANFCNDEDDGSFWSRWIKPDAVFQAEEALVPRSAXNIKSYAEVV

SEQ ID NO: 285404 - protein, 39 aa, Glycine max
  Clone ID: PAT_MRT3847_99749C.1.pep
QRLLERCPMKNLHCSAVPTSKTDPIMSHHCSKYSILVTN

SEQ ID NO: 285405 - protein, 71 aa, Glycine max
  Clone ID: PAT_MRT3847_9974C.1.pep
PSAFTNGTLNIGCHRLSTPITARIRYAGERYACNIKHTHLPAHSGFLQPPTGVFLYQAPVLSSMDTNFDTV

SEQ ID NO: 285406 - protein, 52 aa, Glycine max
  unsure (1)..(52): unsure at all Xaa locations
  Clone ID: PAT_MRT3847_99750C.1.pep
XISQLRGSQSXXRXYXPXLKAXVXXCXXXLDCXXXHCXLEPEFRSFTLRVXC

SEQ ID NO: 285407 - protein, 93 aa, Glycine max
  unsure (1)..(93): unsure at all Xaa locations
  Clone ID: PAT_MRT3847_99751C.1.pep
RADSARVNKFPHYRHTDLFLAGESYAGHYVPQLAKLMIEINKKEKMFNLKGIALGNPVLEYATDXNSRAEFFWSHGLISDSTYXLFTTGCNYS

SEQ ID NO: 285408 - protein, 67 aa, Glycine max
  unsure (1)..(67): unsure at all Xaa locations
  Clone ID: PAT_MRT3847_99752C.1.pep
AATSWILRAAVWFFCLSALVRKVGQAPVFVCPVRPVWLAVLSGRLKDGGGGLXWLALGFWCGLAGWA

SEQ ID NO: 285409 - protein, 72 aa, Glycine max
  unsure (1)..(72): unsure at all Xaa locations
  Clone ID: PAT_MRT3847_99753C.1.pep
EQKKKEPHQKYIGGGRDCAXVIESDEEIDGGFSCLVQENAGVNLXGNLTKEAXEEXERILRKARRRKRKSIF

SEQ ID NO: 285410 - protein, 77 aa, Glycine max
  Clone ID: PAT_MRT3847_99754C.1.pep
RRENRIKSIVIRFFSNLKLTLTTQITKKKTIGVKNTLSEDDFLRLKGGDQPFSFNGVEQNQDIREEQRIKTARNKTF

SEQ ID NO: 285411 - protein, 69 aa, Glycine max
  Clone ID: PAT_MRT3847_99755C.1.pep
SVNATRGPRCHSWGLIHPIPEGPTSSLRRTLGCMPRFPRRVSSGWCLALDIVAFAVVESVLVPSEMCLD

SEQ ID NO: 285412 - protein, 95 aa, Glycine max
  unsure (1)..(95): unsure at all Xaa locations
  Clone ID: PAT_MRT3847_99756C.1.pep
LSYPMLLLAALSGGTTVVYNLLYSEDIHHMLCALKTLVLRLGNYKSSKQSIVVGCCGSFPTTQVCXDEINLFLRNAASAVRTLTASSVSARGNAS

SEQ ID NO: 285413 - protein, 49 aa, Glycine max
  Clone ID: PAT_MRT3847_99757C.1.pep
YILVNVAHNKFDTLVVGVLHYGGFVSLGNKKDDKYKPLPQEEVIGTGFK

SEQ ID NO: 285414 - protein, 322 aa, Glycine max
  unsure (1)..(322): unsure at all Xaa locations
  Clone ID: PAT_MRT3847_99758C.1.pep
MSNEKAPSSASSSSYELSKGINGLDKVILRDARGSSAEVYLYGAHVTSWKNDHAEELLFLSSKAIFKPPKPIRGGIPICFPQFSNLGPLDSHGFARNQFWTIDDSPHPFPTSFSNKAFVDLILKTXQKTDIKIWPHSFEFRLRVALGPGGDLMMTSRIRNTNIDGKPFSFTFAYHTYFSVSDISEVRVEGLETLDYLDNLQKRERFTEQGDALTFESEFDRIYLSTPTKIAILDHEKKRTIVLRKDGLPDAVVWNPWDKKAKAMSDFGDDEYKYMLCVEAAAIEKPITLKPGEEWKGRLELSTVPSSYCSGQLDPKRVIQGS

SEQ ID NO: 285415 - protein, 326 aa, Glycine max
  unsure (1)..(326): unsure at all Xaa locations
  Clone ID: PAT_MRT3847_99759C.1.pep
MSSEKSPSSASASASSSSSYELSKGINGLDKVILRDPRGSSAEVYLYGAHVTSWKNEQAEELLFLSSKAIFKPPKPIRGGIPICFPQFSNLGPLDSHGFARNRFWTIDDSPPPFLTNTPSKAFVDLILKPSEDDIKIWPHSFEFRLRVALGSGGDLMMTSRIRNTNIDGKPFSFTFANHTYFSVSDISEVRVEGLETLDYLXHLQKRERFTEQGDALTFESEFDRIYLSTPTKIAILDHEKKRTIVLRKDGLPDAVVWNPWDKKAKAISDFGDDEYKYMLCVEAAAIEKPITLKPGEEWKGRLELSTVSSSYCSGQLDPKRVIQGS

SEQ ID NO: 285416 - protein, 183 aa, Glycine max
  unsure (1)..(183): unsure at all Xaa locations
  Clone ID: PAT_MRT3847_9975C.1.pep
MFLNIANPSTGAQKLIDIEDEKRVRVFYDKRISQEVAGDTIGDEYKGYVFKITGGVDKDGFAMKQGVLTNNRVKILLDGSTGHYRPLRDGERRRKAVRGCICAADLAVVNLAIGKKGDAELPGVTDTTVPRRLGPKRASRIRKLFNLSKEDDVRQFVIRRTIPXKKDGKKAQINAPRIQRLAT

SEQ ID NO: 285417 - protein, 165 aa, Glycine max
  Clone ID: PAT_MRT3847_99760C.1.pep
ICLLKMSPNTLCSIVCLLLVCNFIWADDEHRSFAEELVRRLRRSHGYSVGYGGNCACSSSAYPATASHTSYTAPKQTSYSSYSCSGSGCGHQAYQPPQKTSYHWCTGTACNKAQAVAHPVPVSSNSYKSSCTTCGSSSHQQHYSTVTETKTVYPVKTYSWCTGTA

SEQ ID NO: 285418 - protein, 85 aa, Glycine max
  Clone ID: PAT_MRT3847_99761C.1.pep
DGPVFFYLKKRLRPFFKKTNPGLKLIFPFLGCHNFFFLAGDLKSMAGENLGRARVKTLVAQPNFVGGENTFEGRGGKKKKRAGTL

SEQ ID NO: 285419 - protein, 66 aa, Glycine max
  Clone ID: PAT_MRT3847_99762C.1.pep
KTPSHPFFFNNFAPGGPPGISGPVPGGDPFFLLGSLFKAGRNQGHSCSLGKIVSPSHFPTNYDPEP

SEQ ID NO: 285420 - protein, 52 aa, Glycine max
  unsure (1)..(52): unsure at all Xaa locations
  Clone ID: PAT_MRT3847_99763C.1.pep
ISHNDGLRXFLAEVSSLGRLKQRNLVGLXGWCKKDVGXFLLIYDYMENGSLD

SEQ ID NO: 285421 - protein, 472 aa, Glycine max
  Clone ID: PAT_MRT3847_99764C.1.pep
IASMVDHYNKLVKLAARAFYDDLTSKGENQPKSGRSDNRGIAVVILDALTRRQWVREEDLAKDLKLHTKQLRRTLRFFEEEKIITREYRRETAKGAKMYSAATAATVDVQLTGKEGEEKVKLHTHSYCCLDYAQIYDVVRYRIHRMKKLLKDELDNKNTIEEYICTKCGKRYNALDALRLVSFEDDDFHCESCNGKLEVENDKFVAQEGGDGDENARRRRHEKLKDMLQKMEAQLKPLMDQLSRVKDLPVPEFGSLLAWEARASAMGRAANGDMSGDSKMSQLGYNGAPMPYSGDTKVVVDFNGTEDIKDVKSETGSTSLKVLPPWMIKSGMVLTKEQRGEVKEEMKMDGTSISSSAQYLDDKKSTVDHDDKKNIQDEYIKAYYAALLKQQHELEAASKQELPNTLTANDPSSSASNRQVGMKSKLEEDDDGTEWEEAPVAGIGNENYKVDLNVEADDTPADDDEEVDWEEG

SEQ ID NO: 285422 - protein, 88 aa, Glycine max
  Clone ID: PAT_MRT3847_99765C.1.pep
QWLLPHSLVLKPLELIHYRQHTIIPCNIIALFHGHRSHHLASMYGPIFKKTFDTRDSHAMLGFAANLSYLSKPVTWSFVILVVGVLVI

SEQ ID NO: 285423 - protein, 163 aa, Glycine max
  Clone ID: PAT_MRT3847_99766C.1.pep
DVKSETGSTSLKVLPPWMIKSGMVLTKEQRGEVKEEMKMDGTSISTSAQYLDDKKSTVDHDDKRNIQDEYIKAYYAALLKQQHELEAASKQELSNTLTANDPSSSASNRQVGMKSKLEEDDDGTEWEEAPVAGTGNENYKVDLNVQADDAPADDDEDVDWEEG

SEQ ID NO: 285424 - protein, 163 aa, Glycine max
  Clone ID: PAT_MRT3847_99767C.1.pep
TRPDKSGYGAVIQTPALHPGMFSILMPWTSGKDIKDRMRKFSRTAHVFALARDQGSGTVNSPSHISYQLKDVDKENLKIGLEKVLRILAAAGAEEIGTHNNKGRSINVKQVSYHEFEKFVKEESSMSLTDISTPLWSAHQMGSCKMGTNPRESVVNQMGETWE

SEQ ID NO: 285425 - protein, 69 aa, Glycine max
  Clone ID: PAT_MRT3847_99768C.1.pep
CALCNKGLVVNASKEPEKPFKKKKRALDCPSPVYRIWGGIFWFDTKFFMGAKVRTKLARWKRVRLKPNF

SEQ ID NO: 285426 - protein, 86 aa, Glycine max
  Clone ID: PAT_MRT3847_99769C.1.pep
RNWAPRDNPDIRKIMGDFLTLFPTKKNNDERGGQSKKKEGRLCGTETTLIFPPGLGYKKDLGRGKAKTKRINHIITQTKRENWLPW

SEQ ID NO: 285427 - protein, 217 aa, Glycine max
  unsure (1)..(217): unsure at all Xaa locations
  Clone ID: PAT_MRT3847_9976C.1.pep
MYIYKKFFWTAGDSEKLVKVLFELARHHAPSTIFLDEIDAIISQRGEARSEHEASRRLKTELLTRAGSXSRTDELVFVLAATNLPWELDAAMLRRLEKRILVPLPEPVARRAMFEELLPQQPGEESIPYDILEDKTEGYSGSDIRLLCKETAMQPLRRLMSQLEQNQDVVPEEELPKVGPIRSEDIETALRNTRPSAHLHAHKYDKFNADYGSQILQ

SEQ ID NO: 285428 - protein, 339 aa, Glycine max
  Clone ID: PAT_MRT3847_99770C.1.pep
MVLNLMFIASSLHSPSPCTLFSSHKLCWSSFKTISKQSHAFLHRNPSLQRHLSLGSKRVLPSVCFFNTEDKSDSKESGWPILRRWEVPWEWQTVSLTSLACGFGFVLAGLTEAIALPYLGIKPDVLSLDDKAEILLLDQSITTAVVLGIIYSVANTFQPLPEDFFKYDLREPFNLQKGWLLWAGVGLAGAILAISLTGVAVSFFNGETPQRETDALVRLLPLIGSSNLSTACLVGITGVLAPLLEETVFRGFFMTSLTKWVPTPVAVVISAAVFALAHLTPGEFPQLFVLGTALGFSYAQTHNLLTPITIHSFWNSGVILFLTFLQLQGYDIRELLQAT

SEQ ID NO: 285429 - protein, 59 aa, Glycine max
  Clone ID: PAT_MRT3847_99771C.1.pep
FKNLIVCHFVLYSPLLSSLEKGHLYILPLCDGGAKQTGKLLKKSKVFKLTPILTRAAIT

SEQ ID NO: 285430 - protein, 44 aa, Glycine max
  Clone ID: PAT_MRT3847_99772C.1.pep
SFSSIILTAGAKLQMLFEAKPCYPKMAAPSKLGNNLKPSKTRSV

SEQ ID NO: 285431 - protein, 101 aa, Glycine max
  unsure (1)..(101): unsure at all Xaa locations
  Clone ID: PAT_MRT3847_99773C.1.pep
XXXNXXXXQATXXPXXTEXEXCEGXXRRQXAGXXAXXCXXHXXXRGRKXXXRHTXXXXXAHRYEXQXKXPXXXXXXXGHDXXXPXDXXSAXXRAXXRRVRX

SEQ ID NO: 285432 - protein, 98 aa, Glycine max
  Clone ID: PAT_MRT3847_99774C.1.pep
YVLQVDHVGPGSNRNRRDETPHITAVIRPSGFRRTTRTQKISCSKLRHRTEIRPYLMHETSNGYSSGLTNTDCRRCHQSSELGENLIVNPVAYIPTKV

SEQ ID NO: 285433 - protein, 55 aa, Glycine max
  Clone ID: PAT_MRT3847_99775C.1.pep
LEEEQKTKEMGCGSEHFIMIFNITLLMLLSSQSTHILTVAGSLFNAVGSFQVHGL

SEQ ID NO: 285434 - protein, 54 aa, Glycine max
  Clone ID: PAT_MRT3847_99776C.1.pep
FVVLGVSYYLLACCYSCCVLRVFKSLVVGSLFNRVNASYILCRFVGRALGTSGG

SEQ ID NO: 285435 - protein, 40 aa, Glycine max
  Clone ID: PAT_MRT3847_99777C.1.pep
QCEVQWAARSVAGVDSQFLCPAKSPPMQAWLSRGLCLPRV

SEQ ID NO: 285436 - protein, 34 aa, Glycine max
  unsure (1)..(34): unsure at all Xaa locations
  Clone ID: PAT_MRT3847_99778C.1.pep
ARLVRQYNDYKLALCTQQAEDNKRDDIGTXIDDD

SEQ ID NO: 285437 - protein, 53 aa, Glycine max
  unsure (1)..(53): unsure at all Xaa locations
  Clone ID: PAT_MRT3847_99779C.1.pep
ELLIPHXCTLLKFPTVTPXXXXTYVXXCXFSRVFVXGRYSRRHHWXTTXATXX

SEQ ID NO: 285438 - protein, 165 aa, Glycine max
  Clone ID: PAT_MRT3847_9977C.1.pep
GECKIGIMPGHIHKQGKIGIVSRSGTLTYEAVDQTTAVGLGQSTCVGIGGDPFNGTNFVDVLKMFAKDPETEGIILIGEIGGTAEEEAAQYLIDNPINKPVVSFIAGRTAPTGRRMGHAGAIISGGKGGAEDKIDALKKAGAHIADSPARLGTTMFQVMKQLGKA

SEQ ID NO: 285439 - protein, 141 aa, Glycine max
  Clone ID: PAT_MRT3847_99780C.1.pep
LFIILSLITKGTFTYTKLLIASSVIMAKFQVLHKYFFIFLALVVCHGSLVAHGRKINVKPLNQQHYSLNTKTVANNNPYPSLPSLKTKVESPQYEEANKLGDSGADNTNAFRSTTPGGSTGVGHKIITSSEDNKMKTMVVV

SEQ ID NO: 285440 - protein, 67 aa, Glycine max
  Clone ID: PAT_MRT3847_99781C.1.pep
IEMRNDIMLVMCKIEERKREDSKEKGSSLQSKYRKLKNQFVSRIIHSFAEYLSSLSLSIWMNESAAN

SEQ ID NO: 285441 - protein, 94 aa, Glycine max
  Clone ID: PAT_MRT3847_99782C.1.pep
PAPPPNPYPAPLALRLPFPMARSQLPPAPHPPPQAPTTGIPQPPRGRHPSPPGMGPPFVWNPRAARQPPPKSGAIPSPLEFSGPFSPPPLGFFF

SEQ ID NO: 285442 - protein, 95 aa, Glycine max
  Clone ID: PAT_MRT3847_99783C.1.pep
FFFFFFFFFFFFFFFFFFFFFFFFLGPRGSTREIETGPLWGARFSLLGKKKKGGESRVKRRPRGKTERRSLRPGKANPEPKRGKPGGPKGGKNPL

SEQ ID NO: 285443 - protein, 301 aa, Glycine max
  unsure (1)..(301): unsure at all Xaa locations
  Clone ID: PAT_MRT3847_99784C.1.pep
SRGTLPDGQDIAVKRLSQTSTQGLTEFKNEVIFCSKLQHRNLVKVLGCCINEQEKLLIYEYMPNKSLDFFLFDSSQSKLLDWSKRLNIINGIARGLLYLHQDSRLRIIHRDLKASNILLDNDMNPKISDFGLARMCRGDQNEGNTSRVVGTYGYMAPEYAIDGVFSIKSDVYSFGILLLEALSGKKNKGISYSNSSYNLIGHAWRLWKECTPXEFIDTCLGDSYVIPEALRCIHIGLLCVQHLPDDRPNMTSVVVMLSSESVLPQPKEPVFLTEKVSVEEHFGQKMYYSTNEVTISKLEPR

SEQ ID NO: 285444 - protein, 162 aa, Glycine max
  Clone ID: PAT_MRT3847_99785C.1.pep
LWKLLLSEKLHVKPDVFTCNNLIQGLCKEGRVHDAARIHSSMVEMGLQGNIVTYNFLIEGYLAARKLIEALKLWKYAVESGFSPNSMTYSVMINGLCKMQMLSVARGLFCKMKDSGIRPTVIDYNALMTSLCREDSLEQARSLFQEMRNVNHNVDVVSFNII

SEQ ID NO: 285445 - protein, 115 aa, Glycine max
  unsure (1)..(115): unsure at all Xaa locations
  Clone ID: PAT_MRT3847_99786C.1.pep
TRPNNTAWALHFAIDTLRLPSLLFGATYKAHSSEAGAFTINMFNPGQPNIMRQKDASSSSSGVLRLTKGGSSGEPTSGCLGNALYAAPRQMWDXETGEGASWATSFEIHSFAPDR

SEQ ID NO: 285446 - protein, 76 aa, Glycine max
  Clone ID: PAT_MRT3847_99787C.1.pep
KIGAPQTWVSSFVTQSPTITIIISTYHYFISFMPIPNFMLFSSHHRSTSTNLTLLQKCFPSTTTQSFMYSKSTIHF

SEQ ID NO: 285447 - protein, 361 aa, Glycine max
  Clone ID: PAT_MRT3847_99788C.1.pep
MSPPVLSIGEEEGKSNVTLLVSSSTTMESVCLKSLEFKERNYMGLSDCSSVDSSVPSFSEETKSNLNLKATELRLGLPGSQSPDRDSDLCLRSSTQFDEKTLFPLRPLTDDHHSSAKTAVLGNKRGFSDAMNGFSSEGKFLVDSEAANPILSPRPASNLGLKPGSTLEKVGVQQTKMKEVATTKANEARPTIDGSANNNNSAPATKAQVVGWPPIRSFRKNSLATTSKNNEEVDGKVGVGALFVKVSMDGAPYLRKVDLKNYSTYPELSSALEKMFSCFTMSKCGSHGILGREMLNETKLKDLLHGSEYVLTYEDREGDWMLVGDVPWEMFIETCKRLRIMKSSDAIGLAPRAVEKCKSRT

SEQ ID NO: 285448 - protein, 64 aa, Glycine max
  unsure (1)..(64): unsure at all Xaa locations
  Clone ID: PAT_MRT3847_99789C.1.pep
EVEXXGLGGKVXKEVQXXXKKREELFTEQRRNVDLKTFASWEYSPEKMMMDMISDPNAVRREDH

SEQ ID NO: 285449 - protein, 173 aa, Glycine max
  unsure (1)..(173): unsure at all Xaa locations
  Clone ID: PAT_MRT3847_9978C.1.pep
PAKKKGHSGALPQDRQGARDPWDRGKQSKGPGTPFTGGKPCFSHWRVNSGGELTQNSNGGPQKKRFGPPVGRRAGLEHEPGGRPNRGGPFQGLAXGPPFPQQRGKDGRPGVDFCLGGYWPGLLNRNVPQKAQPFFKKGGGLFFTRTTPEIFNPLGTAGLTGGKKRLLKGPLSP

SEQ ID NO: 285450 - protein, 180 aa, Glycine max
  unsure (1)..(180): unsure at all Xaa locations
  Clone ID: PAT_MRT3847_99790C.1.pep
MSPPVLSMGEEEGKSNVTLLGSSSTAMESVCLKSLEFKERNYMGSSDCSSVDSSVPSFSEECKSNLNLKATELRLGLPGSQSPERDSDLCLRSSTQLDEKPLFPLHPLTDDHHSSAKTAVLGNKRGFSDAMNGLSSEGKFLVDLEAANPILSPRPACNLGLKPGSTLDKXGAQQTKMKRV

SEQ ID NO: 285451 - protein, 32 aa, Glycine max
  Clone ID: PAT_MRT3847_99791C.1.pep
HVYLDNKYFIKIQTLFRLKKLYYVLYVTRSFI

SEQ ID NO: 285452 - protein, 69 aa, Glycine max
  Clone ID: PAT_MRT3847_99792C.1.pep
MDDAGHRENGRHKAADQYKSAQGQWLMQHQPSMKQIMAMIAERDAAIQERNLAISEKKAAYAERDMAYM

SEQ ID NO: 285453 - protein, 84 aa, Glycine max
  Clone ID: PAT_MRT3847_99793C.1.pep
MCQRRRGGSRRWRSQSTHFGEAFDLLRWMWSSLLLFHGLNGLIPLVATRSIGWCGMNPALVIERDVHRIWRGIYPQGEGRIGRV

SEQ ID NO: 285454 - protein, 129 aa, Glycine max
  Clone ID: PAT_MRT3847_99794C.1.pep
MVNGGDDLTKQLTVSKADWKGQDLGLNQVAYDESTMPAPVCSCTGVLRQCYKWGNGGWQSACCTTTLSMYPLPAVPNKRHARVGGRKMSGSAFNKLLSRLAAEGHDLSNPVDLKDHWAKHGTNRYITIK

SEQ ID NO: 285455 - protein, 175 aa, Glycine max
  unsure (1)..(175): unsure at all Xaa locations
  Clone ID: PAT_MRT3847_99795C.1.pep
MDDAGHRENGRHKAADQYKSAQGQWLMQHQPSMKQIMAMIAERDAAIQERNLAISEKKAAYAERDMAYMQRDAAIAERNNAMLERDNAIATLQYRETSLSSGSMPSCPPGCQISRGVKHVHHPQQQVHHIPNMGDAGGDTREMRTTEGLPAXPIPSETGRGRGARPKGPKAGPPN

SEQ ID NO: 285456 - protein, 315 aa, Glycine max
  unsure (1)..(315): unsure at all Xaa locations
  Clone ID: PAT_MRT3847_99796C.1.pep
MGRSRVALRSADDDPNHRSKRKKAALNVENSETLPTGQGVTTSKVSLYHCNYCNKDISGKIRIKCAVCQDFDLCLECFSVGAEVTPHKSNHPYRIXDWNADEELLLLEGIETYGFGNWNEVAEYVGTKTKSQCIDHYNAVYMNSPCFPLPDLSHVMGKNKVELCAMAKGHEAKKEFSLTAELTLKEEALFTDRINYEESKNAEINNQTMSRLTSACGKAYPSTIKKASNVIQNNGGVKVEESRADWSIGEKKPKLSGEDRPSMTDLSGYSFKREEFDVEYDNDAEQVLADMEFKDTDTKAEYAMKLHVLHIYSKR

SEQ ID NO: 285457 - protein, 76 aa, Glycine max
  Clone ID: PAT_MRT3847_99797C.1.pep
LSLFRELRYSFNLAHYKCHLKHMPFIIRRPDATLYGAAMDYSLPWHEGEKAILAPIRSGADDSSHLSNAEIVTCIN

SEQ ID NO: 285458 - protein, 358 aa, Glycine max
  Clone ID: PAT_MRT3847_99798C.1.pep
MDDAGHRENGRHKAADQYKSAQGQWLMQHQPSMKQIMAIMAERDVAIQERNLAISEKKAAYAERDMAFMQRDAAIAERNNAILERDNAIATLQYRETSLSSGVCERDNAIATLQYRETSLSSGSMPSCPPGCQISRGVKHVHHPHQQVHHIPNMGDASYNTREMHTTEVLPAAPIPSETGKSRRAKRPKEPKSAPPNKKTSKPAKKVKKESEDLNNMFGKAHEWKSGQEMVNGGDDLNKQLTVSKADWKGQDLGLNQVAYDESTMPAPVCSCTGVLRQCYKWGNGGWQSACCTTTLSMYPLPAVPNKRHARVGGRKMSGSAFNKLLSRLAAESHDLSNPVDLKDHWAKHGTNRYITIK

SEQ ID NO: 285459 - protein, 201 aa, Glycine max
  unsure (1)..(201): unsure at all Xaa locations
  Clone ID: PAT_MRT3847_99799C.1.pep
MGRSRVALRSADDDPNHRSKRKKAALNVENSETLPTGQGVTTSKVSLYHCNYCNKDISGKIRIKCAVCQDFDLCLECFSVGAEVTPHKSNHPYRIMDNLSFPLICTDWNADEELLLLEGIETYGFGNWNEVAEYVGTKTKSQCIDHYNAVYMNSPCFPLPDLSHVMGKNKVELCAMAKGHEAKKEFSLTAELTLKEEAXXT

SEQ ID NO: 285460 - protein, 330 aa, Glycine max
  Clone ID: PAT_MRT3847_9979C.1.pep
SDYTNGFVPTLTDERPQKSLLPPFESAEMRALAESLSRDIIRGSPDVKWESIKGLENAKRLLKEAVVMPIKYPKYFTGLLSPWKGILLFGPPGTGKTMLAKAVATECNTTFFNISASSVVSKWRGDSEKLVKVLFELARHHAPSTIFLDEIDAIISQRGEARSEHEASRRLKTELLIQMDGLTKTDELVFVLAATNLPWELDAAMLRRLEKRILVPLPEPVARRAMFEELLPQQPDEEPIPYDILVDKTEGYSGSDIRLLCKETAMQPLRRLMSQLEQSQDVVPEEELPKVGPIKSEDIETALRNTRPSAHLHAHKYDKFNADYGSQILQ

SEQ ID NO: 285461 - protein, 54 aa, Glycine max
  unsure (1)..(54): unsure at all Xaa locations
  Clone ID: PAT_MRT3847_997C.1.pep
FVEKTPCSSSIYRKITYILPYLQMESGKNTIGLVKEKYFFXFKTTLYFYLLHNG

SEQ ID NO: 285462 - protein, 47 aa, Glycine max
  Clone ID: PAT_MRT3847_99800C.1.pep
IQLAAITKDSIKCKAVHLLFNFITFTIHPDDVLYANQKCQKTTLIIS

SEQ ID NO: 285463 - protein, 107 aa, Glycine max
  Clone ID: PAT_MRT3847_99801C.1.pep
LKKPGKKKKALQGNNGASRAFGAITLGQILVLNPFIWVLADKIHPAKLLRMPQILIKKTIMAKNEQLELIQPLATKPRKLALTGEYVQKGWVTPPFGAQLSACHKDA

SEQ ID NO: 285464 - protein, 46 aa, Glycine max
  unsure (1)..(46): unsure at all Xaa locations
  Clone ID: PAT_MRT3847_99802C.1.pep
VKRKAVGXXGCKDCGKVKPGGAYXMNTXSAVTVRSTIRXLREQTEA

SEQ ID NO: 285465 - protein, 74 aa, Glycine max
  unsure (1)..(74): unsure at all Xaa locations
  Clone ID: PAT_MRT3847_99803C.1.pep
RIKRSKGRVNALEEEPKVHKGKGRKEEAPRLEMARARGDRCXRNXGGSRIPESCHRLLRDKEQVRALASNGVWE

SEQ ID NO: 285466 - protein, 66 aa, Glycine max
  Clone ID: PAT_MRT3847_99804C.1.pep
LNLGYPNEKLRRCKQGYVNLDPLKRPLFFFFFFFFFCQANGLSFFYHSQYGLLVIISCISKPWVSL

SEQ ID NO: 285467 - protein, 112 aa, Glycine max
  Clone ID: PAT_MRT3847_99805C.1.pep
EWSMWVGEELLSSLLLLFTFAGVVFDPTGSSAFVLLFPYKILMGNINVAHLVVVVLFCFGLFLPCLCQGNSDDATTDVYVVTLRHAPVSHYYGELRREGNGFKDAAAPGGTQ

SEQ ID NO: 285468 - protein, 107 aa, Glycine max
  unsure (1)..(107): unsure at all Xaa locations
  Clone ID: PAT_MRT3847_99806C.1.pep
HPSALDVLWESGVGDATTGSADHITRGMVSTVMSNMTSDRVNGWRRTMSETVKLGVXIIKDSHSQRQSLLHAHYTLHGVDDDISLNKKILTNMFRRMHKSMWAIGGI

SEQ ID NO: 285469 - protein, 89 aa, Glycine max
  Clone ID: PAT_MRT3847_99807C.1.pep
SSFSHTRSLSCILPQPFSLYLVFLILSDFSKKEYLESLFPFPKPLVPCYFRAIAEYFMKEYTKSGNWRYLRTKMLGENYSYLGSKRQIF

SEQ ID NO: 285470 - protein, 56 aa, Glycine max
  unsure (1)..(56): unsure at all Xaa locations
  Clone ID: PAT_MRT3847_99808C.1.pep
LMPPGYRLDVVLKSAVTPQAFQARNKKVSASKKTKKRLXERFKTGKNRWFFTKARF

SEQ ID NO: 285471 - protein, 192 aa, Glycine max
  Clone ID: PAT_MRT3847_99809C.1.pep
VCPTMAAVRSSSVRRLGSTIQGSFNMELVQHCHYHHSMCMNLARLPSDSLSHPYYKRELQFAKNRFSNLASESLGSSHHFGTRASVSVKPTFSGYCFRSALPFASMSHVLNHRMYSSSVGDKGSRDGGTEVSAGSGATDINTTGDSVVGGDWAERIKDAWKSVAEAASYAGGKVKETSDDLTPFCSQVLDSH

SEQ ID NO: 285472 - protein, 78 aa, Glycine max
  unsure (1)..(78): unsure at all Xaa locations
  Clone ID: PAT_MRT3847_9980C.1.pep
SKQSVISNGTEITVKRLSKNSEQGLQEXFKTEVQIIAKFQHXHVKLLGCCIQQKEXILVYEFMPNRSLEYLTLVNGSL

SEQ ID NO: 285473 - protein, 52 aa, Glycine max
  Clone ID: PAT_MRT3847_99810C.1.pep
AHACAGMLTSYLEPRCTSFSTEATGKRLTSHLVATTTNVIAAIINLVCQCER

SEQ ID NO: 285474 - protein, 39 aa, Glycine max
  Clone ID: PAT_MRT3847_99811C.1.pep
ILMRRVGLFRVISIFFSFSFSINPYSYLYFSIFCVRNIN

SEQ ID NO: 285475 - protein, 85 aa, Glycine max
  unsure (1)..(85): unsure at all Xaa locations
  Clone ID: PAT_MRT3847_99812C.1.pep
HNNPMKTHFGLAXTINMENINNHRKPIQYINIIHIQFQKYTAIIIGQRRNGRGKKGKPSFPRHQNQEEKNQKLFGSARELTTFPQ

SEQ ID NO: 285476 - protein, 193 aa, Glycine max
  Clone ID: PAT_MRT3847_99813C.1.pep
MGQKHLPIYTSPEETGKDHIDNEESEMHEDTEEINALLYSDDDDDDEVTSTGHSPLVTKRTYVMQEQFAGMKKEVAGSDWPNKRQKLIDSGYNTLPPLMDSASSERLNEMCEYASDAESKYSSSGGVYAARQTKEDNPTPADIQLKKDKIRELLRVLENFIPGAKGKHPLLVIDGTIEYLKSLASQAGTLKYH

SEQ ID NO: 285477 - protein, 275 aa, Glycine max
  Clone ID: PAT_MRT3847_99814C.1.pep
MTISPSLTLTPTTPRITATTHTSHTSHTSHPTYLKLNPISRPSPLRAFLPLTSRAPTRRCPSTPACLFTGIVEEMGTVKQLGISPHGGVDLKIAASTVLDGVNLGDSIAVNGTCLTVTEFDTKVADFTVGLSPETLRKTSLSELEPGSAVNLERAVTPASRMGGHFVQGHVDGTGEIVSKIPEGDSLWVKVKADKGLLKYIVPKGFIAVDGTSLTVVDVFDHEECFNFMLVAYTQQKVVIPLKNVGEKVNLEVDILGKYVERLLASGFASSFADK

SEQ ID NO: 285478 - protein, 69 aa, Glycine max
  Clone ID: PAT_MRT3847_99815C.1.pep
WTENQMEDKDTLVLMSNKQVVKTKRDYRTLRLTLSNCTIQVRLQLNSGMIRTVSSNQRTQGALIWPRAE

SEQ ID NO: 285479 - protein, 62 aa, Glycine max
  Clone ID: PAT_MRT3847_99816C.1.pep
FRVLPLFAFCSRVVCGCDLLAVSLCSQVCPWLLLAAVWLTLLKFKRPPVTVRYSQVKKQKPV

SEQ ID NO: 285480 - protein, 96 aa, Glycine max
  unsure (1)..(96): unsure at all Xaa locations
  Clone ID: PAT_MRT3847_99817C.1.pep
GESNTTLHSQSSGFFSNYFLLYXSILFLSINFFIQTIIFKNLPSSPFFFSIILNLHQLNQPLHLTFHTLSQKYVPIFFLLFYFPFFLFISSSLSVQ

SEQ ID NO: 285481 - protein, 93 aa, Glycine max
  Clone ID: PAT_MRT3847_99818C.1.pep
GSGPLPGDSSDRWGGPSFQGVPRRASYEDRLCGFQVAAIFPPWAPVMSKDTANLVRAKFFYVRSSLGIGPHRVFQSNKGVGSAFRLRMGILPR

SEQ ID NO: 285482 - protein, 142 aa, Glycine max
  unsure (1)..(142): unsure at all Xaa locations
  Clone ID: PAT_MRT3847_99819C.1.pep
LRQVFMLRMETVWVHAHASKHVRCTSVKRAERVWHSASXXDRXXDRTGWVLDRMGSAVPRRGRGSGVRXXSRPYPMDRXXGVSAXEGRXYSARGHDAXXMGHSHXPIPPGAHPTTGRHSRXGFLLHSXFLLAQAPIAPETHH

SEQ ID NO: 285483 - protein, 1266 aa, Glycine max
  unsure (1)..(1266): unsure at all Xaa locations
  Clone ID: PAT_MRT3847_9981C.1.pep
TTVNRRREATAAAERFLMSSTSINNTESYLYLHPSENPTIALVSPVLDSTNYHSWSRSMVTALSTKNKVEFIDGSAPKPLKTDRMHGAWRRCNNMVVSWIVHSVATSIRQSILWMDKAEEIWCDMKSRYSQGDLLRISDLQQEASTMKQGSLTITEYFTRLRMIWDEIENFRPDPIYSCNIRCSCTAFTIIAQRKLEDRAMQFLRGLNEQYANIRSHVLLMDPIPAISKIFSYVAQQERQLLGNTGPGINFEPKDISINAAKMPSNYDAKNKSNNGRKTCTHCGKLGHTVDVCYRKHGYPPGYKPYDERTTMNNVVTVESKATDDQAQHHESHEFVRFSPEQYKALLALIQEPSAENTTPNQPKQVASISSCTVNTPINLGMSPSTSALSTSWILDSGATDHVTSSLHNLHSHRRINPITVKLPNGQYVHATHSGTIQLSPNITLHNVLYIPTFTFNLISISKLVSSINCELIFSSTSCVLQETNNHMNIGIVEAKHGLYHLIPNQITTKASNVIPIDLWYFRLGHPSAERIQCMKTXLSSSXHPNNINFVCNICHYAKHKKMSFSSSNSHASHVFDLLHMDIWGPCSKLSMHGHKYFLTIVDDCSRFTWVHLMKSKAETRHVIMNFIAFIETQYNGXVKIISDNGVEFFMHHYYASKGIIHQTTCVETPEQNGVAERKHQHLLNITRALLFQASLPPNFWCYALPHAAYLINCIPTPYLHDISPYEKLHKHPCDISNLQVFGCLCYINTLKANRQKLDARAHPCIFIGFKTHTKGYLVYDLHSNDVAVSRNVMFYEDHFPYSPSPGSFSGKNLDPPIENYPSRPTISVPSSNEPSNEQPLPHLRRSTRAKHAPTYLQDYHRDLASSTSNASAVVRYPLSSVFSYSRLSPAHRNFVLSISSTTEPSLYAEASRHDCWIKAMKVELQALQSNNTWRLTPLPPHKTAIRWICIXYKIKYRADGSIERHKARLVAKGYTQMEGLDYLDTFSPVAKLTTIRLLLALAALNRWHLRXLDVNNAFLHRELDEEVYMQIPPDLSVDNPQLVCRLQRSLYGLKQASRQWFTKLSSFLTSHGFQQSNADHSIFLRFTGAITTILLVYVDDIILTGNSIAEIQTIITLLDQEFRIKDLGDLKFFLGLEIARTSDGIHLCQHKYTLDILCDSGMLGCKPNSTPMDYSTKLQMNSGNLLSTESSSSYRRLIGKLIYLTNTRPDIAYAVQQLSQYMATSTNTHLQAAFRILRYLKGTPIPGLFFDSTRAFQHATFSETY

SEQ ID NO: 285484 - protein, 104 aa, Glycine max
  unsure (1)..(104): unsure at all Xaa locations
  Clone ID: PAT_MRT3847_99820C.1.pep
XPXTXXRXDSXXAXXXXLRXPQXXAXXAXXSAXSXKXQTRERXXSQXXXXXXXLTTXXXXAXXHGXAKXXTXXDXXXXRTXXXSTXXNXNXXXXSXXXXXXHNX

SEQ ID NO: 285485 - protein, 449 aa, Glycine max
  unsure (1)..(449): unsure at all Xaa locations
  Clone ID: PAT_MRT3847_99821C.1.pep
RYLGNFGEPLRKSGIPEKNTRKPSCFRFLVFSDPNILYRVLVYKHFLKRRKSDVFKDFLKIEQKSXSHHEVKFPIPGCAWYTSVTYKTNKVGLXVKYSPLTSMRSLPYYEPYLSMDXKFIMYEQTTCRPRXEIGFIASLTESVVQLGLAQSXNQVNFKQVGGKRAYPKNANPWARDPIAIVSKISGVSGYGACGGNQNAYDGRMDSSRYMQPQSAAGGFPPYGSSAYSAPGYGYGPASNGIGYGAYGSYGGATAGYGGPAAATYGNPNVPNAAYAGGPPGGPRSTWPAQAPSGYGSMGYGNTAAWGAPSGGAGSGGAGPGSATAGQSPGGAAGYGNQGYGYGGYGGYGGSDSSYGNSGAYGTVGGRTGSAPNNNASASGGSELTSSGGSGNYMGGGYGDANGNSGYGNAAWRSEQTHASGNYGTPQGNGGQVGYGVGYGGAQSRQAQQQ

SEQ ID NO: 285486 - protein, 101 aa, Glycine max
  Clone ID: PAT_MRT3847_99822C.1.pep
GGCAHERSCDCSDLSASSVVCGHMALCRGRAWSALGGPTVACQPMFLVPSVEGSRRRPGTPAWGSRSPTVGGLAHNRFIPTSRLGRLRPAGTKQAHKSTPR

SEQ ID NO: 285487 - protein, 37 aa, Glycine max
  Clone ID: PAT_MRT3847_99823C.1.pep
SGSTVSGTCYRFNLGMELCHSLVIWFGLTRRYRLIDR

SEQ ID NO: 285488 - protein, 391 aa, Glycine max
  Clone ID: PAT_MRT3847_99824C.1.pep
MSAASLLFSCSMHVGVSHPKVAAKPSPCCLLNQPWNHLKSKTPFGHSGVFEKSKLSHKGDEILWRAGALQVESAPSFSMGQKFHLHDVIEAQQFDRETLNAIFEVARSMESIESKSSRSQMLKGYLMATLFYEPSTRTRLSFESAMKRLGGDVLTTENAREFSSAAKGETLEDTIRTVEGYTDIIVMRHFESGAAKRAATTASIPVINAGDGPGQHPSQALLDVYTIEREIGKLDGIRVGLVGDLANGRTVRSLAYLLAKYQDVKIYFVSPNVVKMKDDIKDYLTSKGVEWEESADLMEVASKCDVVYQTRIQKERFREKIELYEEARGKYIVNQDVLDAMQKHAVVMHPLPRLDEITVEVDRDPRAAYFRQAKNGLYIRMALLKVLLLGW

SEQ ID NO: 285489 - protein, 50 aa, Glycine max
  Clone ID: PAT_MRT3847_99825C.1.pep
KIFIQNFLLSLVSMIHLMQLCTQKKLNVPKKIIHQCNCTNKNKMAPFVLY

SEQ ID NO: 285490 - protein, 105 aa, Glycine max
  Clone ID: PAT_MRT3847_99826C.1.pep
DPSPRPPKCTVLWKGVLRLKKQRASSLSPSSSSSSSSSSASSLGDVAAKEGKEGQQHVKRVKKGLERARSATIRIRPMINVPICTQVKSSALPPLFPIKKGKLER

SEQ ID NO: 285491 - protein, 70 aa, Glycine max
  Clone ID: PAT_MRT3847_99827C.1.pep
SKGDVNFCCPRCLPFGVSRSLALFFLGIELGGDEQFHSSQNEDPPEIPRDIFHGKLMGNLLFSPGWPILG

SEQ ID NO: 285492 - protein, 276 aa, Glycine max
  Clone ID: PAT_MRT3847_99828C.1.pep
GELEPNRLEYGCEKTTEGSLMKRDSRKDSSNGGLSDAPDVSDVRSSMIGEIENRSSHLLAIKADIETQGEFVNSLIREVNNAVYQNIDDVVAFVKWLDDELCFLVDERAVLKHFDWPEKKADTLREAAFGYQDLKKLESEVSSYKDDPRLPCDIVLKKMVALSEKMERTVYNLLRTRDSLMRHCKEFKIPIEWMLDNGIIGKIKLSSVKLAKKYMKRVAMELQAKSALEKDPAMDYMLLQGVRFAFRIHQFAGGFDAETMHAFEELRNLASLLNKT

SEQ ID NO: 285493 - protein, 95 aa, Glycine max
  unsure (1)..(95): unsure at all Xaa locations
  Clone ID: PAT_MRT3847_99829C.1.pep
INAFRFELIIRKEVFRLWKKDFIKCFLHQLNCILIFLIHILICITIITTRVVHFISCKEILLSFFFVLPSNXCLFSPVLLNTACLYINCHILTNF

SEQ ID NO: 285494 - protein, 116 aa, Glycine max
  unsure (1)..(116): unsure at all Xaa locations
  Clone ID: PAT_MRT3847_9982C.1.pep
TWAVDFRVDXRQRVAVDLESVATHEIGHLLGLSHSSVKEAVMYPSLRPRDKRADLNIDDIKGVQSLYGSNPNFRSEWSLESDMSANQGSAFVEPLRLISSLIIIISLIHSLCSYII

SEQ ID NO: 285495 - protein, 95 aa, Glycine max
  Clone ID: PAT_MRT3847_99830C.1.pep
RFKYEQIARYWKSPSWVAIPFIFHAYRLHQIHRAAKFLTVISFQVKKGYSKLPVARGSLSTTTNAFRILIVIWIWSFSSFLMRFLTSASASTTKQ

SEQ ID NO: 285496 - protein, 79 aa, Glycine max
  unsure (1)..(79): unsure at all Xaa locations
  Clone ID: PAT_MRT3847_99831C.1.pep
SLNSTLLLLLLLACXCIQHSFCDEPSDTGLNKWKCRCSSLQGNKIYSLANCSKSCDCHPDAEENASIWTCDVHPNGFXK

SEQ ID NO: 285497 - protein, 316 aa, Glycine max
  Clone ID: PAT_MRT3847_99832C.1.pep
MEMTMSAATCSNMTRFSGILRTTCVSSSPKRKHAKGILRNFTICASPFISSVDPIIVNSPSFQVLASNLSLADVPQRSEEWFALRKDKLTTSTFGTALGFWKGSRRPELWQEKVFASEAQIMGANNAMAWGTLKEAVAVEQYKKITGNEVSSMGFAVHSKQSCDWLGASPDGVLGCPPQLGILEVKCPYNKGKPEAGLPWSKMPFYYMPQVQGQMEIMDCEWVDLYCWTPNGSTIFRVLREREYWNLIHDMLREFWWENVVPAREALLLGREEEVKSYKPASTHQKTGVAIAKSIKLAQETKLFCRELAGHVEFYS

SEQ ID NO: 285498 - protein, 254 aa, Glycine max
  unsure (1)..(254): unsure at all Xaa locations
  Clone ID: PAT_MRT3847_99833C.1.pep
MPHSSKHKSSKHSSRDAREHSDSERDSGAKDRRSKEESGRRRXKKDSSSAEKRRPDSKDAHGNGEYSDEYASSSKRRKDRXGGGDRWNGGEEGSKKSKTAGDSKSRRRDGSVGVYGEGEEVKKSSGKGDGKHRDSXRGEAGRVRAAAEKEKERKFKEGGRSEESVDEQEQRVSKQVFEINDSKKIDELQGPEPDNQLERRTRKKRDDYSDGDKHQDNAGDGYDRHLSSRDDIAKDGKEKNDQAQFARREGARRR

SEQ ID NO: 285499 - protein, 50 aa, Glycine max
  Clone ID: PAT_MRT3847_99834C.1.pep
MGHYIRDRHPFSITSAPGDDYLSVHIRQLGDWTQELKRVFSEACEPPVSG

SEQ ID NO: 285500 - protein, 119 aa, Glycine max
  unsure (1)..(119): unsure at all Xaa locations
  Clone ID: PAT_MRT3847_99835C.1.pep
SXKXPLRAVTILCPNVLADHENPPVNKPTTEKPPCFKPTDEKHTVXKPAGENPPICKHPVEKPPGYKPPLEKAPQYKPLHDKPPGLKPPEDKPPMCKPSVEKPTPYKLPXEKPTMYNPP

SEQ ID NO: 285501 - protein, 66 aa, Glycine max
  Clone ID: PAT_MRT3847_99836C.1.pep
MTMPLPHRPLFIDRYWKVPVLKNRISIINPYTLHLIMDIPFPTNEDVDLAVAVAKAELSLFKDTGW

SEQ ID NO: 285502 - protein, 112 aa, Glycine max
  unsure (1)..(112): unsure at all Xaa locations
  Clone ID: PAT_MRT3847_99837C.1.pep
MYSMWGNMAQTIAPLEYRLGTTQTHDYIWLDQPTNXSANIQEDKKLXDCIKCYIQDIIXIYSGVEGIGQIKIPKRMDLIQVIIHMGSPXFLIKGKSPKIAELQTSMRCVGSY

SEQ ID NO: 285503 - protein, 166 aa, Glycine max
  unsure (1)..(166): unsure at all Xaa locations
  Clone ID: PAT_MRT3847_99838C.1.pep
NDNIDLLXNDLLPLLGAGKAFPNKIVFDDKLVLANTQEFFDGNFPVDSWLPIFVNCLYPVSQLPPEAVVVNVTCGSGXGGLPTTAWISCAVNNRSSDINKEMLTALVKGXKVVFITRADPFSVAILACLFGVKKEILRCNATNSMLTRLFGTVRVLKSGCERPLYL

SEQ ID NO: 285504 - protein, 493 aa, Glycine max
  unsure (1)..(493): unsure at all Xaa locations
  Clone ID: PAT_MRT3847_99839C.1.pep
LHRCQRKEWAFVLIDGLADVSLPRLGYKTPLQAAKLPNLDAIASAGVNGLMDPVEVGLACGSDTAHLSLMGYDPRVYYRGRGAFESMGAGLAMSPGDIAFKSNFATLDEKTGIVTSRRADRHFEEEGPILCAALDGLKLPSFPQYEVRVRYATEHRCGVVVKARNLSGNISGTDPLKDNRLLLKAEALDDSHEARNTAAVVNELSKEITKILVSHPVNAKRAAEGKNIANVVLLRGCGIRIEVTPFINRHGLRPCMVAPTKIIAGLGLSLGIDILDAPGATGDYRTLLTSKASAIAKALSAPLQSCPKVFVPGEDELKAGRSDGYDFGFLHIKAIDDAGHDKASILKVKALEAVDKALGQLARLLWEAESTGKFQFFLCVTGDHSTPVEYGDHSFESVPFTICRLKDFVGAIGESTISKSSLDPFPIPSVKSGEDLLDDLETEERRQMXEAYSGDSVYELNEVAAAKGCLGRFPGGEMMGIIKKFLNLDAGTA

SEQ ID NO: 285505 - protein, 113 aa, Glycine max
  Clone ID: PAT_MRT3847_9983C.1.pep
TEGRPAHRESTPASEQEATSTERTASLAHDSPERATAQRPRPRPRRKRSKAPGTPKRERERAEQTANHPETRRPEPQRSPRQTPSTKGNSSPKTGPRTQPKRGHTHQGTTSPQ

SEQ ID NO: 285506 - protein, 169 aa, Glycine max
  unsure (1)..(169): unsure at all Xaa locations
  Clone ID: PAT_MRT3847_99840C.1.pep
MVCAISSSPFSTLSFRRLVVRNATPSPCKPRAVKPLTALPSAGRRQLLFFLTATTALTAREAASVAQDIPLFGIRKSLKKVEEEAEEIVREGFEAADKGLVAAEKGLETAEKGLVAAEKGIEEAEREIEETVSFGGLAQAGAVAGAEVFGILVATAVVSXILGPEAQKS

SEQ ID NO: 285507 - protein, 153 aa, Glycine max
  unsure (1)..(153): unsure at all Xaa locations
  Clone ID: PAT_MRT3847_99841C.1.pep
EERAPTHPYGCEKTTEGHRINAQYYQQESVSEQKYRCCKSNRHLMXVVSRVTEKELKQQENRLQRGGARGRSKXHEMLWAEIEYFQKREIELENENLCLRTKITDVERIQQVNMGSGPELNVIQALASRNFFNPNMLDGGTVYPQTDKKILHL

SEQ ID NO: 285508 - protein, 81 aa, Glycine max
  Clone ID: PAT_MRT3847_99842C.1.pep
PTKNRLAESLVRFSNFIIHPSTESLVHFSNFIIHPSTESSTSKTFLSFSSSDSKTFLACFSSSFIESSSVQPVSFGESCSI

SEQ ID NO: 285509 - protein, 50 aa, Glycine max
  Clone ID: PAT_MRT3847_99843C.1.pep
LDWAVHAFIISIVCVQNTTHIHTHMCFSYFSDLIHYIIYMDAHVLTIDNS

SEQ ID NO: 285510 - protein, 135 aa, Glycine max
  Clone ID: PAT_MRT3847_99844C.1.pep
PPGPPPLPPPNLLPPHLPSPPPAPAPPPNPALPPNLDLPPTPPPPPNLPPPPPPNLLPAPPPPNPPPAPPPNPPPPPPPNPPPPPPPTPPPNPGRWKKFFSSLNEPFSLPSFLASMVQTRAPRSARRRTLEAILC

SEQ ID NO: 285511 - protein, 64 aa, Glycine max
  Clone ID: PAT_MRT3847_99845C.1.pep
TSELNLHFNTNTNTPSSSQHHSIKLLSCLCYLLVLLSPTTTPTDSSHKTPFFINTNFHIPSKKM

SEQ ID NO: 285512 - protein, 61 aa, Glycine max
  unsure (1)..(61): unsure at all Xaa locations
  Clone ID: PAT_MRT3847_99846C.1.pep
AAAISMALSSSYGAGEAGKLGRSTPYVGRVSMRKTVANQVSXGSLWYGPYRVKYLGALSGE

SEQ ID NO: 285513 - protein, 63 aa, Glycine max
  Clone ID: PAT_MRT3847_99847C.1.pep
GVCKGITSYLWKKSPKKTLFPFTGGDYSYPTMVLLGPSKKKNSFPLSLRWGGKNIHQSVSRAG

SEQ ID NO: 285514 - protein, 46 aa, Glycine max
  Clone ID: PAT_MRT3847_99848C.1.pep
NGNSPGISVLFSLGSRKGLLRNELFQIKTRPFWLLYFLKMWNWNSP

SEQ ID NO: 285515 - protein, 60 aa, Glycine max
  Clone ID: PAT_MRT3847_99849C.1.pep
IKLHRKKCQIQTSTKVQYSKIKIRGAIDTDLNTEAKPKPMAIDLQAKATTKEIEISLVYL

SEQ ID NO: 285516 - protein, 44 aa, Glycine max
  Clone ID: PAT_MRT3847_9984C.1.pep
VKDDVCVLIHFVAIIYWFLSFQPYFFSPLLSFYFSWIFKFLRYS

SEQ ID NO: 285517 - protein, 203 aa, Glycine max
  unsure (1)..(203): unsure at all Xaa locations
  Clone ID: PAT_MRT3847_99850C.1.pep
MPNDSVLSLFFFVTLFTCLLSATSHDDHIFLPSQLHDDDSVSCTATDPSLNYKPVIGILTHPGDGASGRLNNATGVSYIAASYIKFMESGGARVIPLIYNESPENLNKKLDLVNGVLFTGGWTVSGPYCNTLRNIVKKALXKNNTRNHVPVITFNCNRNLVIKILSEQTDILEPCTTSNLRNSLICYKKTDAKISLCQRCASD

SEQ ID NO: 285518 - protein, 181 aa, Glycine max
  unsure (1)..(181): unsure at all Xaa locations
  Clone ID: PAT_MRT3847_99851C.1.pep
MPNDSVLSLFFFVTLFTCLLSANSHDDHIFLPSQLHDDDSVSCTATDPNLNYKPVIGILTHPGDGASGRLSNATGVSYIAASYVKFVESGGARVIPLIYNESPENLNKKLDLVNGVLFTGGWAVSGPYLATLGNIFRRALQKHDAXDHSPVIACNLRGILQIMIGSERTRILVPLSVVQLP

SEQ ID NO: 285519 - protein, 140 aa, Glycine max
  Clone ID: PAT_MRT3847_99852C.1.pep
RVMATWGVVRGINMETICAWAYNVLARPHAHSTLVNVNARFRYWPSVLVDASAARRRFHVVATLRDRIEALGQASRGIEAFILPYWAWERHASRLRVNRCFGCRAVGPRRLTLAIFQLSVRLVVQATARVVTGPWTVRSR

SEQ ID NO: 285520 - protein, 59 aa, Glycine max
  Clone ID: PAT_MRT3847_99853C.1.pep
CHMSFVLRLSEMGWGKGPPMKLSGNHNQLLQTQWSRASLICSSLPISLNQDGSQDLSLN

SEQ ID NO: 285521 - protein, 342 aa, Glycine max
  Clone ID: PAT_MRT3847_99854C.1.pep
MPNDSVLSLFFFVTLFTCLLSATSHDDHIFLPSQLHDDDSVSCTATDPSLNYKPVIGILTHPGDGASGRLSNATGVSYIAASYVKFVESGGARVIPLIYNESPENLNKKLDLVNGVLFTGGWAVSGPYLDTLGNIFKKALEKNDAGDHFPVIAFNLGGNLVIRIVSEQTDILEPFTASSLPSSLVLWKEANAKGSLFQRFPSDLLTQLKTDCLVLHNHRYAISPRKLQYNTKLSDFFEILATSEDRDGKTFVSTARGRKYPVTVNLWQPEKNAFEWATSLKAPHTEDAIRVTQSTANFFISEARKSTNTPDAQKVRDNLIYNYKPTFGGTAGKGYDQVYLFE

SEQ ID NO: 285522 - protein, 64 aa, Glycine max
  Clone ID: PAT_MRT3847_99855C.1.pep
SSMRDQFPHAVGTSQIHEQGFHLALNFTGLYKNSFLPHSIKNPPGETTGGRYRCTLPTLTHKPC

SEQ ID NO: 285523 - protein, 58 aa, Glycine max
  Clone ID: PAT_MRT3847_99857C.1.pep
KSLILMPCSTPTTYIVIANFFRTPTNLHEIQLQISVLPFKRKFLKTIPSIKIKNYIST

SEQ ID NO: 285524 - protein, 154 aa, Glycine max
  Clone ID: PAT_MRT3847_99858C.1.pep
MDTNTLGVDPKKRKTSTVENAFNLQAKETLDHEIARMFYSSGLPFHLARNPHYRKAFAYAANNHISGYQPSAKRAIDCSNEIKDKDFITKHMREEDDVAKAKFVKDTLLDDKWWDKEHSNPVTPNAYTPKSPSGPFSPDSGPTPKIILAHRHSS

SEQ ID NO: 285525 - protein, 111 aa, Glycine max
  Clone ID: PAT_MRT3847_99859C.1.pep
SFPWSYAHLGTEMALDHRESPFLKGGMNDLGCAHNLEVHLHLVDGYHGKGKRFCLATKRDIALVNKSCDFLKSEYGVPSHWRQDENKGMVRSRDGRWVLAGPAQYLRLNSP

SEQ ID NO: 285526 - protein, 357 aa, Glycine max
  unsure (1)..(357): unsure at all Xaa locations
  Clone ID: PAT_MRT3847_9985C.1.pep
PESVQSKDSAVILSKLFEDEIVENARSLLDNYNLMKDGFKPVKIKSGHHWWKSSCYEKLEKIGGSDFSAWASEYVPAYRLEIDTKILGDSKIGGWKKSAEXNRWEVLLTHSQMVQLAETLDIYYVDPYSLPYKQLSCGVAAKFANVYNKKGNSFPKLLSFALASGIFLVAISALGQFCLPWLCKERKHSVEHRSLPSSEVNVAMNDFFDTKKLEECCVLAIAKAKGTFGWSGEIKVEDGIGVWIGELPAYLRGEGVDTLSTSENIDADAKVPIQDIASYQVVFSSEGKIVGFQPLSRVAVNHWSVNPLARELYGGKKLSPSIIEPGLKVSLPEKVIVVELLMSINPDAYFALARPFR

SEQ ID NO: 285527 - protein, 104 aa, Glycine max
  unsure (1)..(104): unsure at all Xaa locations
  Clone ID: PAT_MRT3847_99860C.1.pep
EYRITEIMHEXVNCMRXHSKRTLFTTYDVDTCTCLXNFLPIYAYTSNDPSRLTXSAGHKDMLYMDDXDVDIKDIDEAALPETPVDTSITSDWVAIDGVPPAIAE

SEQ ID NO: 285528 - protein, 159 aa, Glycine max
  Clone ID: PAT_MRT3847_99861C.1.pep
LELLSSNVSNFDLKSNVTPPLQVLQTAVTHPDRLQFVLSGLDIEDNEYRVYLYFLELNSTVKAGKRVFDIYVNGEIKKERFDILAGGSNYTYTVLNVSANGLLNLTLVKASGAEFGPLLNAYEVLQMRSWIEETNQKDVEGIQKIREELLLQNQDNIAL

SEQ ID NO: 285529 - protein, 62 aa, Glycine max
  Clone ID: PAT_MRT3847_99862C.1.pep
QKTYLCLKIKWGFTSRKLRLVIKNARTSAQQNRTRKKALPKDKGAGYTYRLDGGENGKTFFT

SEQ ID NO: 285530 - protein, 82 aa, Glycine max
  Clone ID: PAT_MRT3847_99863C.1.pep
SFRVDHSALRGVQQSDSRRATCERSIGHVLHFNSTFTGRPPIRTVSVMQYRPLKTVVPPVWVPMMSGCSGCRPVCLLAITLQ

SEQ ID NO: 285531 - protein, 41 aa, Glycine max
  Clone ID: PAT_MRT3847_99864C.1.pep
PIPGLHRSHIANFWLFPSKAATIVAVAFAVSQSAGRGGIPL

SEQ ID NO: 285532 - protein, 56 aa, Glycine max
  Clone ID: PAT_MRT3847_99865C.1.pep
IMILAYLVCFGVEADCLTRISLPYPYLPLCAFLNDNFIIIWFECKSIWFLMLPFPR

SEQ ID NO: 285533 - protein, 71 aa, Glycine max
  unsure (1)..(71): unsure at all Xaa locations
  Clone ID: PAT_MRT3847_99866C.1.pep
GYVCVRGFDREARAPRPXMARLHFPASKLAKTKERTKKESSSTAKSRGSKPNPEQPELIANSSNLLQTGRD

SEQ ID NO: 285534 - protein, 76 aa, Glycine max
  Clone ID: PAT_MRT3847_99867C.1.pep
QPFLPSSSSFSSFSSSSPSPSFHLFQYHHQILTSELVIPNIQKLLLLLLLQLQLICHIVNLCFGGKGEHYLIVQFS

SEQ ID NO: 285535 - protein, 72 aa, Glycine max
  Clone ID: PAT_MRT3847_99868C.1.pep
IQTVRANIVCQSSRSCLACSQIMLLRSLSREPTQQGPNKEANIQLNKTVARSVSLSNFFTHQITFFPSCLGL

SEQ ID NO: 285536 - protein, 72 aa, Glycine max
  Clone ID: PAT_MRT3847_99869C.1.pep
DYSVTWNFNANPYFEDPKLAKTYTLLEYGTPKVTATPICWKEGLGIPNGVSHEKTRYTRTSTDVSFFRLLTD

SEQ ID NO: 285537 - protein, 68 aa, Glycine max
  Clone ID: PAT_MRT3847_9986C.1.pep
HTVIAGLSMYDLKRSTSSSITLAPLSALVSLFMSCILASKQLIFSERMYQSRTYTMSLRSKKEQLIFQ

SEQ ID NO: 285538 - protein, 108 aa, Glycine max
  Clone ID: PAT_MRT3847_99870C.1.pep
PNHHPTHKSDVYAYGILLLELLTGKFPSELPFMVPGDMSSWVRSIRDDNGSEDNQMDMLLQVATTCSLTSPEQRPTMWQVLKMLQEIKEIVLLEDSSELDIRSSNAMP

SEQ ID NO: 285539 - protein, 46 aa, Glycine max
  Clone ID: PAT_MRT3847_99871C.1.pep
NKYDIFVSAPDLLGLDSVDGNEMVIKLLAHVKPGMHFPGQRLLRKE

SEQ ID NO: 285540 - protein, 75 aa, Glycine max
  Clone ID: PAT_MRT3847_99872C.1.pep
AVDLTHYAWIASIVMQAHKLSIIVFFQLTKYKPLFNSKKWWLSYPVSPEIVCYNVYRSAPTHTYVLDDSEGEIHK

SEQ ID NO: 285541 - protein, 38 aa, Glycine max
  unsure (1)..(38): unsure at all Xaa locations
  Clone ID: PAT_MRT3847_99873C.1.pep
AHRVIQCYPASRDFRPNRRRFRXWRDISAIMLPERRVC

SEQ ID NO: 285542 - protein, 52 aa, Glycine max
  Clone ID: PAT_MRT3847_99874C.1.pep
NPGAFDKLGLTGLPIVIKLHNLPYLTILNWFLEGFCCYLFLFETMDCPCTPK

SEQ ID NO: 285543 - protein, 313 aa, Glycine max
  Clone ID: PAT_MRT3847_99875C.1.pep
MEGLSMKEPYFCDRPSSTRIFSSSDPPEAPPSPSTPLQHSHEKKKQLCVEEEEELEKEPKQHVSVTLLDLNIISGEDDNSCTPEGPELNLITCLDVGSSSNNANSSSETTTPLGGSSDHTEPRVFSCNYCHRKFYSSQALGGHQNAHKRERSIAKRGHRFGSQIMAFGLPLLHHNNNIRFASMASLPLYHSNRGTLGIQAHSMIQKPSSSHLHVNGFGGSYAHHHGWSRPIIDQQPGIAKLAAPDFHHRTKSALSSSQSSVGRFEMIVNSSNTMLNSAATNNEIGGCVASGGTCLKTTTNQEEMKHLDLSLKL

SEQ ID NO: 285544 - protein, 107 aa, Glycine max
  unsure (1)..(107): unsure at all Xaa locations
  Clone ID: PAT_MRT3847_99876C.1.pep
SCPPRRLSLSRSLVLNRLRSPYRGGEKAQPGWPWRHXKGYRCIGGVLYKVSANTLYNTLRQPSVGGSKPLLYTGRMDPACKCSPSLASRAEQRSQAIIREALQLKEK

SEQ ID NO: 285545 - protein, 275 aa, Glycine max
  Clone ID: PAT_MRT3847_99877C.1.pep
MLHSHSHHHHLLFSSLPLRLSLTTTHHNSSLPSLHFLHRPIITTTTTTTTVSAIPPTAAWLAKLTTQDFAHFELPSSHLFTDDPSTIQVACSVLLTGAITVFFFRSVQRRAKRAKELKFRSSGVNKSLDNLKAISSSSIKAKSPPSPDQALLGAIIAGVIAVVLYRFTTSIEATLGRQTLSDNFSVRQITITIRTIINGLCYLATFVYGINSVGLFLYSGQLAMDTMGGGSSGKETESKITQQPGLSNASVENSNNNNNNKLSSTKEDQSSNNSL

SEQ ID NO: 285546 - protein, 275 aa, Glycine max
  unsure (1)..(275): unsure at all Xaa locations
  Clone ID: PAT_MRT3847_99878C.1.pep
MLHSHSHHHHLLFSSLPLRLSLTTTHHNSSLPSLHFLHRPIITTTTTTTTVSAIPPTAAWLAKLTTQDFAHFELPSSHLFTDDPSTIQVACSVLLTGAITVFFFRSVQRRAKRAKELXMQSSGVNKSLDNLKAISSSSIKAKSPPSPDQALLGAIIAGVIAVVLYRFTTSIEATLGRQTLSDNFSVRQITITIRTIINGLCYLATFVYGINSVGLFLYSGQLAMDTMGGGSSGKETESKITQQPGLSNASVENSNNNNNNKLSSTKEDQSSNNSL

SEQ ID NO: 285547 - protein, 75 aa, Glycine max
  Clone ID: PAT_MRT3847_99879C.1.pep
SFHFFHLPVKSKAFLGSAKKKENFFTCKITFILSPPHLRVMLCSLRHIYFQHHHHIFSVKNVGKFGILVTHLLVT

SEQ ID NO: 285548 - protein, 76 aa, Glycine max
  Clone ID: PAT_MRT3847_9987C.1.pep
LEDPFIFFIGQNGELSVGVRGALRQRGNVASSHLSSHSVRTGVPAPAWHAIWTGTIYTVYNKPRTSPAEFIEPYDQ

SEQ ID NO: 285549 - protein, 85 aa, Glycine max
  unsure (1)..(85): unsure at all Xaa locations
  Clone ID: PAT_MRT3847_99880C.1.pep
SVLLALGVSGVPAVPLFLLFGXFPSVRXSPSXAASXLSSAGRLPVXSSSPWAGSPCFSSXSCFCCSSLFCPLGRCVLFPVRPPPL

SEQ ID NO: 285550 - protein, 78 aa, Glycine max
  Clone ID: PAT_MRT3847_99881C.1.pep
LPSLGPPWLFSFFFPLVCFFHLLTVFLFSQGSPFSIIAPCFYNSPFMESWFGFWFRFKILQANPRVEKKKKKKKKKKF

SEQ ID NO: 285551 - protein, 64 aa, Glycine max
  Clone ID: PAT_MRT3847_99882C.1.pep
SGTPRRQTIIRHVQASGTIYSMPMLSSISNPSLAWVASQFLFAWSSFCSDNWSHRICLRNSATR

SEQ ID NO: 285552 - protein, 61 aa, Glycine max
  Clone ID: PAT_MRT3847_99883C.1.pep
NKLNCHLSQCMAFELSLEGYESIIFCIEYVLYSFNPLCRLFATVSSQGVTHQSMEGGAFWL

SEQ ID NO: 285553 - protein, 134 aa, Glycine max
  unsure (1)..(134): unsure at all Xaa locations
  Clone ID: PAT_MRT3847_99884C.1.pep
XKTGCVFLKTPVRNANKKHXKLKRRQPHPEQETNPNQSAKTARHRPTDNPISSRTMGRKNNTGTQREASHPTNPKPPPSGPTPPLPPTHYPFYRKGPYQSQQTTQPQNRNPGAPEPPARTNRRHPPQGKSKGNK

SEQ ID NO: 285554 - protein, 120 aa, Glycine max
  Clone ID: PAT_MRT3847_99885C.1.pep
YTLLTRGALYGSVWPSAKLVVVANVVFDVYAGNNCFLPVNPLLKLTSCAPFASILKLTPFIPHMRISYTFAISLTPPRFMPIYPSYPFCHGPSVTRSSLLLANHSTTKQQFSHAIKYQQL

SEQ ID NO: 285555 - protein, 98 aa, Glycine max
  Clone ID: PAT_MRT3847_99886C.1.pep
PFVGPILINPFKTLSALQSTPCPKIPFGHKFGQRVPTEYLFPHLVFLCSPISSYFVSRYILVPFGGCSPPIGFFRQFGFNWGLPFMELSIFFLSQSGS

SEQ ID NO: 285556 - protein, 88 aa, Glycine max
  Clone ID: PAT_MRT3847_99887C.1.pep
KKKKGGEKIKILIKGPRGSPGKSRPGPGGGTNFPYRGGNKSWAKKGKKLFPGGNSIPFTIPKKKGAGAIKGKAGGAKGGGKHTLLGWG

SEQ ID NO: 285557 - protein, 198 aa, Glycine max
  Clone ID: PAT_MRT3847_99888C.1.pep
MAAVAGASSSVIKVAALSGSLRKGSYNRALIRSAIELSQGRVEGLQIEYVDISPLPLLNTDLEVNGTYPPQVEAFRQKILAADSILFASPEYNYSVASPLKNALDWASRAPNVWAGKPAAIVSAGGGFGGGRSQYHLRQIGVFLDLHFINKPEFFLNAFQPPAKFNNDGDLIDEDAKNRLKDVLLSLKEFTLRLQGKN

SEQ ID NO: 285558 - protein, 54 aa, Glycine max
  Clone ID: PAT_MRT3847_99889C.1.pep
VLFSLHTTLSSGAPPALPTGFRRSLLFFWFWGEAKETLNVIISILVSYRSHVRN

SEQ ID NO: 285559 - protein, 67 aa, Glycine max
  unsure (1)..(67): unsure at all Xaa locations
  Clone ID: PAT_MRT3847_9988C.1.pep
SQEGIRTGWETHVRAATTLWVEGRPFLRARVXNAELHTRPDDVVKAEPVTTINDMGAYGPNPGILGS

SEQ ID NO: 285560 - protein, 63 aa, Glycine max
  Clone ID: PAT_MRT3847_99890C.1.pep
FKKSIFFQLIDFELKIQDHRNINFSLLNIDQQIITYGHTITITTKIYPSRSDWQHGLIIDIEL

SEQ ID NO: 285561 - protein, 142 aa, Glycine max
  unsure (1)..(142): unsure at all Xaa locations
  Clone ID: PAT_MRT3847_99891C.1.pep
ADFRTAQNNTAQGQTKPQKPQKPGGKKPKATAKKTQKHGTAATARRXHXASSRPATARKXXGPPGTXRXPGDKANXHRXPKXGXXASXETRXTGPXEGEDXXKTGKAXQAXGARXXKEGDTRXXXGXGXGGPPAPEAPXXXG

SEQ ID NO: 285562 - protein, 58 aa, Glycine max
  Clone ID: PAT_MRT3847_99892C.1.pep
GSATFGRYSKRVTLDTCDRVFYVCYSWIEIFEILCTILMLDIVNINCCIFTYSDIYLV

SEQ ID NO: 285563 - protein, 47 aa, Glycine max
  Clone ID: PAT_MRT3847_99893C.1.pep
HPTQRGSISCVTLLETVGPPPMPLGLVECGTWHLFAAYGSRWSTPGS

SEQ ID NO: 285564 - protein, 63 aa, Glycine max
  Clone ID: PAT_MRT3847_99894C.1.pep
DGSGNYEIEESSGSVKKVQNLGPTVFASKFAANTKKGNHKLQDPVPQLFKPDEPDFSLDPEQV

SEQ ID NO: 285565 - protein, 124 aa, Glycine max
  Clone ID: PAT_MRT3847_99895C.1.pep
NGEKGIKVYEAPPPLDFTLATNESENNPQNAQPTTLDSSSQLASALDSNNIHIHERQARELKAGLHPLKHKFVVWYTRPQPRIRNHASDEDTITSTVELTTVERIWVCYCHLAPPASLPTPTDL

SEQ ID NO: 285566 - protein, 56 aa, Glycine max
  Clone ID: PAT_MRT3847_99896C.1.pep
MYDVMGTCIGRGFCDYNLSLSRGSQYVHHVQYTVTLNGQSLEFVRKCVCHRPSETP

SEQ ID NO: 285567 - protein, 85 aa, Glycine max
  Clone ID: PAT_MRT3847_99897C.1.pep
EGDDREVENKLLFHLEFDKFSLIKFLLRNRLKIVWCTRLARAQDQEEREKIEEEMKGTELQPILEQLHATRASAKERQKNLEKSI

SEQ ID NO: 285568 - protein, 39 aa, Glycine max
  Clone ID: PAT_MRT3847_99898C.1.pep
ANVYFIQTGPTLLRLAPIVERGDAQVGCVSQLIDTKVGK

SEQ ID NO: 285569 - protein, 56 aa, Glycine max
  unsure (1)..(56): unsure at all Xaa locations
  Clone ID: PAT_MRT3847_99899C.1.pep
RYAQIHLLALSAMSRLQSLFKAGLCRIMVTIQRITITHRSQSTPQCLFREKNSVXS

SEQ ID NO: 285570 - protein, 442 aa, Glycine max
  Clone ID: PAT_MRT3847_9989C.1.pep
ASRPARSSSVTRSSISTSHSQYSSYSSNRHSSSILNTSSASVSSYIRPSSPITRSSSSARPSTPSSRPTASRSSTPSKPRPVSTSSTAERNRPSSQGSRPSTPSSRPHIPANLHSPSASSTRSLSRPSTPTRRSSMPSLSPSPSPTIGSLTSAGRVSSNGRNSAPASRPSSPSPRVRPPPQPIVPPDFPLETPPNLRTTLPDRPVSAGRSRPGGVTMKTNSSETQASPVTMPRRHSSPIVSRGRVTEPAAKTRGYSNGHHVDAPEPRKVSHAPEVAARKSVRSSSTAPDNTGFGRTISKKSLDMAIKHMDIRNSSGNIRSLTSTTLFPQSIRTSTTKSHRVSSAPASVDMNGSMISSKNGANFDVGNGIDRNMMMKGRDADERHYSAKLSEVDIYESSRYDALLFKEDLKNTNWLHGADDKCDQGPIFDNGFEHLPEPFGLL

SEQ ID NO: 285571 - protein, 31 aa, Glycine max
  unsure (1)..(31): unsure at all Xaa locations
  Clone ID: PAT_MRT3847_998C.1.pep
GGYVFLNKNACSXLMYVIKKWYMLYAYYLYP

SEQ ID NO: 285572 - protein, 389 aa, Glycine max
  unsure (1)..(389): unsure at all Xaa locations
  Clone ID: PAT_MRT3847_99900C.1.pep
MYFFTEKMHSLKMGFPDYIQTLEEERRKIQVFSKELPLSLELVTQAIEACKQQLSGTASEYNLNGHSECSEQTTSTEGPVLEEFIPIKKMASSSPFCDEEDEDDEQHSHKQRVSKENNNSDKRKSDWLRSVQLWNPDPPAEEDVNKKVPGLELKRSGNGGAALHPPRLLGCGALPRVSVSKAPSSTSVAAASSSAAEPAAEKSLNEGQRKLRRCWSQDLHKRFLHALQQLGGAXVSISIYTATPKQIRELMNVDGLTNDEVKSHLQKYRLHTRRPIPMVHNSSDPQAAPFVLVGNIFVQSPEYAAVATSTASREVATVAAPARIYAPVATHPTPVSHPPDDSIKNPQFKKVKLFEHSNSDDRANHSEGAVHSNSPTSSSSTHTSTSLGY

SEQ ID NO: 285573 - protein, 167 aa, Glycine max
  Clone ID: PAT_MRT3847_99901C.1.pep
ARGFLHALQQLGGADTATPKQIREIMNVDGLTNDEVKSHLQKYRLHTRRPSPMVHNSSNPQAAPFVLVGNIFVQSPEYAAVATSTASREVATVAAPAGIYAPVATHPIPVSHPPADSIKNPQFKKVQLFEHSISDERANHSEGAVHSNSPTSCSSTHTSTSLAIEFK

SEQ ID NO: 285574 - protein, 113 aa, Glycine max
  Clone ID: PAT_MRT3847_99902C.1.pep
KCCSSSSSSSSQKGNDHAIFLIGIISSKTGPSVDVVCSHHSEWPFKLYSLAVPDNCCLQPSMAAKKNQVSKIPSESKPRKERRKLYDPQAKTTKVYGWFFCCVTLSDQFQGKR

SEQ ID NO: 285575 - protein, 235 aa, Glycine max
  unsure (1)..(235): unsure at all Xaa locations
  Clone ID: PAT_MRT3847_99903C.1.pep
PYCPGGDLNALRYRQTDHVFSPAVIRFYVAEILCALQHLHSMNIAYRDLKPENVLIQQSGHVTLTDFDLSRTLSXPLIFPPTPLLLLXSRKHRRWVPLPLPLHAKNKNPKPARVSPVNRRKLSFVRSTSFVGTEEYIAPEVLRAEGHDFSVDWWALGVLTYEMLYGTTPFKGTNRKETFRNVLFKPPEFVGKKTALTDLIMGLLEKDPXKRLGYVRGASEIKEHQVFXGLRWDLL

SEQ ID NO: 285576 - protein, 124 aa, Glycine max
  Clone ID: PAT_MRT3847_99904C.1.pep
FLDVRDDLQSPLLPIIQVALASGSGPHIEIVRQAQLGIDLLNLRTVDAHGLPLQPDGLHLSTPAQAHLGQMMANAFLQFVPSSNVNYKVSPILNEAIRLYNYAFYVCMLPLFITLFTIMYPSFL

SEQ ID NO: 285577 - protein, 42 aa, Glycine max
  Clone ID: PAT_MRT3847_99905C.1.pep
NSRLDRRVSTAVSTAQKGEPQGDCSACQVVTPLHHDRPHRFT

SEQ ID NO: 285578 - protein, 102 aa, Glycine max
  unsure (1)..(102): unsure at all Xaa locations
  Clone ID: PAT_MRT3847_99906C.1.pep
EEIQQQWCTSRLQKSKXYFKSYQVKFKRXREGKXGYRARXIRLINQXKNKYNXPKYRFXVRFSNKDIVAQIYXASIAGDLVLATAYXHMSCPRXGLAVGXTD

SEQ ID NO: 285579 - protein, 307 aa, Glycine max
  Clone ID: PAT_MRT3847_99907C.1.pep
MAPASNFDTVEFQMNETDEISQIYNKHRLPSLSGLAKVSPLVHRASIGGVLNVGELNRIKRLVQVQNQFKTFYNQMLEEDEEVKYPILHDKMNHLPILTDLFKEINEKCDAHDLFDHASYTLQSIRSKISRTNQRIRQNLDRIVKNQGNQKKLSDAIVTVRNDRNVIPVKAEYRQDFNGIVHDQSASGQTLYIEPNSVVEMNNQISRLRNDEAVERERILTELTGLVSAESDALLVAESVMGQIDFLIAKARYARTIKGTKPTFKEERTIYLPNAFHPLLDKDTVVANTIEFIDDVETVIITGPNTG

SEQ ID NO: 285580 - protein, 98 aa, Glycine max
  Clone ID: PAT_MRT3847_99908C.1.pep
ALSNNLAQPPKLVLANCATGGLVAPLAWDALVPTNYQYCVRAGTGGLLAKAILLGHLALSKGPVLVFCSWAPLSLLSGFSPPPPPPPPPPPPPPPPPS

SEQ ID NO: 285581 - protein, 85 aa, Glycine max
  Clone ID: PAT_MRT3847_99909C.1.pep
FWGNWFPRRFPARINFRVGEVNSRGAPLFFFFFFNLPHGARLTLFVYIEINAKQYTSHKLTGHHNILTVPTSLEFVVLRPPSHVR

SEQ ID NO: 285582 - protein, 88 aa, Glycine max
  Clone ID: PAT_MRT3847_9990C.1.pep
IRLEQKMNTFRMVREFGLAVELKLDYRRGSDLVMAEEIEKGLKQLMDRDNVVHKNVKEMKDKARKAVLTGGSSYIAVGKLIDNMLGSN

SEQ ID NO: 285583 - protein, 88 aa, Glycine max
  Clone ID: PAT_MRT3847_99910C.1.pep
KGNNTLLLPLFYTLLLFLGVSAGNGSNDDTNRKEVYIVYMGAADSTNAYLRNDHVQILNSVLKRNENAIVRNYKHGFSGFAARLSKEE

SEQ ID NO: 285584 - protein, 105 aa, Glycine max
  Clone ID: PAT_MRT3847_99911C.1.pep
MNTKASVAYGWGVLILAGGGAYYFAKRSINADREERAAMNERRRQAMRPQRAAPTSQIPSNDRPSPSQEGGADPAPVTHAQEDLSAKGKYEAAEPFRSRKGDRFS

SEQ ID NO: 285585 - protein, 129 aa, Glycine max
  Clone ID: PAT_MRT3847_99912C.1.pep
IAVAVVVSSSRSFDIAENCEQITADAATIEVGAKITITESFFKPCSPTQEDHRPNCENSKLNRKVWDFLSNLEACFIDPFPEYGMELHRNEKKFHFKGESAELRIGETQKRNPNWVGTHLGIGERIENV

SEQ ID NO: 285586 - protein, 47 aa, Glycine max
  Clone ID: PAT_MRT3847_99913C.1.pep
EKRKIELLEKKKKKKKKKKKKKKKKKKKKKKSRGGTKNQLKPKKKSN

SEQ ID NO: 285587 - protein, 54 aa, Glycine max
  Clone ID: PAT_MRT3847_99914C.1.pep
NDIKIYISECCWVCRVTRYWTTCKCSTNFMLEMLIPKLNSTDYPSINLIVTKGP

SEQ ID NO: 285588 - protein, 109 aa, Glycine max
  Clone ID: PAT_MRT3847_99915C.1.pep
INLNVDCNFLLGIWCIFFQDTKQEQQHIKSSSQVTQKGSKLSEADKHIDQTPPDARVRYLKDQLIQVRVYLSLQAVRNNPHLTRELRLRVKEVSRTLGDASKDSDLPRK

SEQ ID NO: 285589 - protein, 136 aa, Glycine max
  Clone ID: PAT_MRT3847_99916C.1.pep
HPSKFKFEHLRFCYERLEYIGQKIQVLFFVDLVMAERLLMKHLDAPGLWLQEKHRRLLMNKYCGRYLRAKHLHRVIIFDEKVQDTYEHNRRKRNPATTAVQQALHGLSYLVYGKRDVRRLMFEVFDFEQIQPKEVV

SEQ ID NO: 285590 - protein, 116 aa, Glycine max
  unsure (1)..(116): unsure at all Xaa locations
  Clone ID: PAT_MRT3847_99917C.1.pep
SFSSLFSSFFVRAXAGXAGPPPGAAASAPAAPPPXGSVARFSXPVGGALLPVWAVFFCRXVAGGXLTRVKRERRXXCPSCPRRVGLRCLTXRRXRWRXCPSFCAXVFLCGGAXCAG

SEQ ID NO: 285591 - protein, 540 aa, Glycine max
  unsure (1)..(540): unsure at all Xaa locations
  Clone ID: PAT_MRT3847_99918C.1.pep
MEHSISFILSTKPCSSVPPNLTFSLSLCXFPIQLLIRNGNSKFPQTPPFRIIAVALEPQQDFPSGNSPQRLLKELAERKKATSPKKGPPRRFILRPPIDDNKLAERFLNSPQLSLKSFPLLSSCLPSSRLNNADKLWIDEYLLEAKQALGYSLEPSETLGDDNDNPAKQFDTLLYLAFQHPSCERTKARHVRSGHSRLSFLGQYVLELALTEFFLQRYPRESPGPMRERVFGLIGKRSLPKWIKAASLHNLIFTFDDMDKIMRREKEGPVKSVFWALFGAIYLCFGMPEVYRVLFEVFGMDPDAEDCQPKLRRQLEDVDYVSAEFEGKLSWQDIVAYKPPADALFEHPRLFRACVPPGMHRFRGNIWDYDTRPHVMKTLGYPLEMADRIPEITEARNIELGLGLQLCFMHPSKYKFEHPRFCYERLEYVGQKIQDLVMAERLLMKHLDAPGLWLQERHRHLLMNKYCGRYLRAKHLHRVIIFDDKVQDTYEHNRRKRNPATTAVQQALHGLSYLVYGKRDVRRLMFEVFDFEQIQPKEVV

SEQ ID NO: 285592 - protein, 127 aa, Glycine max
  Clone ID: PAT_MRT3847_99919C.1.pep
TALTNSRFAAFAERDQSLIDRGPDASHHHLVVLCTPINPYWRPCRTFPAADRYQLSAPYPIYLSAVQAVMTIFDSFDEPDVNCIIVFKVNGSVGILHDRRFLLDSFIDQRVTLRQMIVTAHDPWQAL

SEQ ID NO: 285593 - protein, 62 aa, Glycine max
  Clone ID: PAT_MRT3847_9991C.1.pep
KKKQGIGRPPPKSLTENVFIHSYDVIQGLSHKTYMPSYYKKRNKPPGLKFQLEIREYNGQSF

SEQ ID NO: 285594 - protein, 76 aa, Glycine max
  Clone ID: PAT_MRT3847_99920C.1.pep
LKMKAKINSMKSTLYSRKLVKIIIIHHIFSNVDSRPKVPYEKANTFCTRPFFKEALLTTRKHNKNEECLIISLLTN

SEQ ID NO: 285595 - protein, 54 aa, Glycine max
  unsure (1)..(54): unsure at all Xaa locations
  Clone ID: PAT_MRT3847_99921C.1.pep
LVHIVTVVLPXVLFQYTKIIQNPSYGELQKATNQGRRCTWEKLSAIKANCGIEL

SEQ ID NO: 285596 - protein, 302 aa, Glycine max
  Clone ID: PAT_MRT3847_99922C.1.pep
MSSSKLTLYGIGTALFRTRRTAPVTVTPHSPFLFFKPIPFPPCFLRPDSSSSSSFSAAAAAAAETLPSVDHPWPEWVSFVDRLNTKGYLPKTSSSDDTVSLYANMNSLKDACLSFARDRYDLFNLLPTNDIQAVVEGGCPNLLRKAVNSAKRLRAHLQLDEGDVCGACYLRSSCDRAYVILKDFETDARTVDIVRILLFYALDPLVLSGGDKPPGREVIESSVRKLLSQLIELSESPAPAPAPARSKPTAQDAVVEGQSLSVTTNQLFKDAEMKKGDWMCPKCNFMNFSRNTQCLNCNEDRH

SEQ ID NO: 285597 - protein, 165 aa, Glycine max
  unsure (1)..(165): unsure at all Xaa locations
  Clone ID: PAT_MRT3847_99923C.1.pep
GDYCWDTAGLSADPETFAKNRELXVIHSMRAMLGALGCIFPEXLSRNRVKLLESLSFMAGSQIFTDGGLDYLCTLSLIRALSILAFWATLIILMGACYRXPIVSGLDCEVTIQYYPDGCSYTCDLDDDTYVFAVLIVSGINYGRVCYFFMIVFLQQATCNDETSL

SEQ ID NO: 285598 - protein, 56 aa, Glycine max
  unsure (1)..(56): unsure at all Xaa locations
  Clone ID: PAT_MRT3847_99924C.1.pep
YMGKGXNKGKAGYVGRHLKLRTVCLYQSPSKEVVPSQFNRISCIRDGPKGKPXVWE

SEQ ID NO: 285599 - protein, 40 aa, Glycine max
  Clone ID: PAT_MRT3847_99925C.1.pep
PCVQPSVGTLNSEELGHEQVLRLSAQRAVMPPLVVLGDVV

SEQ ID NO: 285600 - protein, 67 aa, Glycine max
  Clone ID: PAT_MRT3847_99926C.1.pep
IFTFRQNFKPELHHTLPRIIPRGVLTPNFPVALYFSPYSFPPPPPPPPPPPPKEGGRHTVMTGNLPG

SEQ ID NO: 285601 - protein, 95 aa, Glycine max
  unsure (1)..(95): unsure at all Xaa locations
  Clone ID: PAT_MRT3847_99927C.1.pep
WSKPIVSLSLGCKAIFLLGGKSREDTPLAMFFQSGDVVLMAVEARECFHGVPRIFPDKENAEIGHLXTQLTREDDLCFLQYIQTFRIPSNISQVF

SEQ ID NO: 285602 - protein, 42 aa, Glycine max
  Clone ID: PAT_MRT3847_99928C.1.pep
MEYPLLTIFFFLQYSNALFKEFIPSSFFYSIIVIVIIFYSLN

SEQ ID NO: 285603 - protein, 97 aa, Glycine max
  Clone ID: PAT_MRT3847_99929C.1.pep
PPQWLCLHRHYHLVRSILLRLTAKLTKADTLTDYHYFSTRSDLSITIANAHGYFNFLYITLVLHLYYHTRLPSSYLTVDHGVSEECHSDSHSDGYIK

SEQ ID NO: 285604 - protein, 95 aa, Glycine max
  Clone ID: PAT_MRT3847_9992C.1.pep
MARWCMILVVLALAVVASARNMPNDAGLEDQKNFLGYGFSGVGNNGLPFGGVGSGFDGNMGGPSGLGGLGGFGGPGGLGGLGGPGNGEGPSLPLP

SEQ ID NO: 285605 - protein, 230 aa, Glycine max
  unsure (1)..(230): unsure at all Xaa locations
  Clone ID: PAT_MRT3847_99930C.1.pep
MPLLMKRAYTTSQIAIVGANPCPIESLDYEIFDNEILKNDWRSKKKVQIIXYVMLKWGFALLIGLGTGLVGFFNSFAVENIAGFKLLMTTGLMSKHRYLDAFLAYAGANMCLAAAAAALCAFIAPAAAGSGIPEVKAYXNGVDAQNILAPSTLFVKIFWFHPXEFLLDFVVGKEGPMVHTGACIASLLGXGXGSHKYHLTCTWLRYFKNDRDRRDXXTCGAAALLPPFRA

SEQ ID NO: 285606 - protein, 102 aa, Glycine max
  Clone ID: PAT_MRT3847_99931C.1.pep
PCAIMRMYMVEGLRREIAHAIYINSIFPSWTNVEGGPNHETKSLESFCLSSVRLMLFHPYCELTCQRKKDGVFRYLEETEEWLYKDGVEEGEHGYSTKLDEL

SEQ ID NO: 285607 - protein, 110 aa, Glycine max
  Clone ID: PAT_MRT3847_99932C.1.pep
ENAGTDSKARSSRKLQCAPSPNHRFNINNSNLNSTMWDTIANFKENLNKIALDVHYADEDDVVFPPDVHTAAVSDRRNSHSSAHSKSLPMSPAASNGTSDHPYSPEVMFS

SEQ ID NO: 285608 - protein, 101 aa, Glycine max
  Clone ID: PAT_MRT3847_99933C.1.pep
FSPPDAKGGAGDSPVPFGAPLPMGFRGFLVHLGTIPIPGGGVTPARSFGGVIFFTRALGWGDPWFFWGGPFLGGGFWALFPRVVIRALPFRSKCFNQRVFV

SEQ ID NO: 285609 - protein, 50 aa, Glycine max
  Clone ID: PAT_MRT3847_99934C.1.pep
GTCSGLLRRRYTLLLNDDTAGMTHRYLVVILIVIAYTLTITSIRLIMATV

SEQ ID NO: 285610 - protein, 75 aa, Glycine max
  Clone ID: PAT_MRT3847_99935C.1.pep
TRRIGPKEPPSPACCQALEGADIPCLCQYFTIYALLFSLEKGVYVLNSCGIPVPPGTRCGSYTFPPAPAPARPEN

SEQ ID NO: 285611 - protein, 94 aa, Glycine max
  Clone ID: PAT_MRT3847_99936C.1.pep
KFHAWLFIIGKRDAEGHGWNQMFTTDKNSPKMIPCDSTFGRSRNPNKYDPSPTKLLSLFYPKPPNKKGVKITPSTDVDFTLLRLSNPIKKDKND

SEQ ID NO: 285612 - protein, 281 aa, Glycine max
  unsure (1)..(281): unsure at all Xaa locations
  Clone ID: PAT_MRT3847_99937C.1.pep
MMALQEKLDRFKKQQEKCQTTLSSIAASKAAATQKSAAHGSANGRNAAPAVKFSNDTERLQHINSIRKAPVGAQMKRVIDLLLETRQAFTPEQINGACYVDMKANKDVFENLRKNPKVNYDGQRFSYKSKYGFKDKTELLQLVRKYPEGLAVIDLKDAYPTVMEDLQALKAAGQIWLLSNFDSQEDIAYPNDPKVHIKVDDDLKQXLFRSIELPRXAQRRRKDLQKNGMKPATNTAQRRSAAQIQGISSKPKPKKKKSEISKRTKLTNAHLPELFQTLNSS

SEQ ID NO: 285613 - protein, 112 aa, Glycine max
  Clone ID: PAT_MRT3847_99938C.1.pep
FSTPVEEEETVEFCWDLITAISIANVHRFHIFWPNFHEYLLSVAQFPMFSPIPFVEKGILGLLKVCLKLFSAPRDEKQAEELIFKSVNLMWKLDIEILDTFHDVISHSSSKI

SEQ ID NO: 285614 - protein, 139 aa, Glycine max
  Clone ID: PAT_MRT3847_99939C.1.pep
MYGATTSGNSRQSFNQDQVPNLTGSSSPEPASETQSGRAEWTRKSLEGSAVKEPDPLDMSEEAKAERWFRRIAQIKDISELSQIPDEDFPSIMPMRKGVNRFVVSKRKTPLERRLTSQQYRRNLPTASSDPIKKENEGS

SEQ ID NO: 285615 - protein, 115 aa, Glycine max
  Clone ID: PAT_MRT3847_9993C.1.pep
MQLWLTPATLVRSDSSKQHRCDSVSSEQLRFDSTQHCSDESRYFHFVVPYEFYFFLHQITKKLNDKNFLLWRQQIKSAITMRGLNRFVVNPQIPPQYVFDEDCDLDRVNPLFSMW

SEQ ID NO: 285616 - protein, 98 aa, Glycine max
  Clone ID: PAT_MRT3847_99940C.1.pep
GSSCHILVLLVILCLDCPHIKKDICYCLKKKKKKKKKKKKKTKKKTKKNRKPRGIRLCEPAKCCLTAAETQPPGHSGTNPHRRINRGPIGTAQTSHSH

SEQ ID NO: 285617 - protein, 97 aa, Glycine max
  unsure (1)..(97): unsure at all Xaa locations
  Clone ID: PAT_MRT3847_99941C.1.pep
RKQRSRSLSRPRMLEQHDASLKNVSKNYRKPDGTLSGGARDHARQDCHPCTQVTALILSMKADRLGLNMGAAGHGLMRYXWWNPTTDDQALDRAHQL

SEQ ID NO: 285618 - protein, 140 aa, Glycine max
  Clone ID: PAT_MRT3847_99942C.1.pep
MLIQENFRLQFYEPIRREHSLIVTNTDVDSLCATNILTHIFSCDDASYTLSPVDSFPTLEKAINDHVRQAKNIVLVNCIGSRSVSELSIARLTDEVTFWVLESRRPLNLEDIYNANSVRVLAPAAEVAEWTLPEASAIFE

SEQ ID NO: 285619 - protein, 49 aa, Glycine max
  Clone ID: PAT_MRT3847_99943C.1.pep
NLFLRNRKVSVNRLTPFYRPFCPARLFCMGYVAPFSGSAVFLNGQFLFT

SEQ ID NO: 285620 - protein, 47 aa, Glycine max
  Clone ID: PAT_MRT3847_99944C.1.pep
TSSHSVKCMRTTLRKELVSPTHRVCMVRRQCMQLHPSLSSHANVRVG

SEQ ID NO: 285621 - protein, 59 aa, Glycine max
  Clone ID: PAT_MRT3847_99945C.1.pep
LVSANINLKPIKLVSFSPHIEKIERGYELMRILDSPSIHPFRKDKEGSILAQGDAVWKL

SEQ ID NO: 285622 - protein, 111 aa, Glycine max
  unsure (1)..(111): unsure at all Xaa locations
  Clone ID: PAT_MRT3847_99946C.1.pep
ALHEPCTDLFKLKIQQLSSNTGLCVFDWVVFWQGYQGFLDAEFNRIITENSWFVFGGXYAGALSAWVRVKFAHLTCGSXXSFGGVVGVYNFTEYDQQIGEVGGGECKGVLQ

SEQ ID NO: 285623 - protein, 58 aa, Glycine max
  Clone ID: PAT_MRT3847_99947C.1.pep
GWGDCGVEGKRHHNTIKGPLCHVRCKNSNPSRKGKGETIPNPRTQMTSKAPKITTPQN

SEQ ID NO: 285624 - protein, 110 aa, Glycine max
  Clone ID: PAT_MRT3847_99948C.1.pep
MKRGKDDEKVMGPMFPRLHVNDTEKGGPRAPPRNKMALYEQFSIPSQRFNSGVLPLNPNISSNTVPPASSSLRTVPERNCVYPGHLHHKDLFIELKKVLTPIRRDFECFS

SEQ ID NO: 285625 - protein, 94 aa, Glycine max
  unsure (1)..(94): unsure at all Xaa locations
  Clone ID: PAT_MRT3847_99949C.1.pep
RGVNHFTRMRSPKGVILGLGPGGLAGLVVPPQTSGGAAFKVAPRVXAPSSNNRGQLLLFVVHPGYWWXVLYNILQPVFSPLNRIGSRGFKVCEI

SEQ ID NO: 285626 - protein, 76 aa, Glycine max
  Clone ID: PAT_MRT3847_9994C.1.pep
YFFTSINKHVQNLGNGFNPLIKNIVGYSKSPKCFKIASDLLQIRNLKVPFPAPYIGSSPHIFWGRLDIIKNHLCRL

SEQ ID NO: 285627 - protein, 53 aa, Glycine max
  Clone ID: PAT_MRT3847_99950C.1.pep
KFKSTFSQFIFTTESKLMANKEGHICHNIQDIMMISTSAINLCNGSYLVHSHL

SEQ ID NO: 285628 - protein, 40 aa, Glycine max
  Clone ID: PAT_MRT3847_99951C.1.pep
TYLQLQPVAVCVSKNILVVSPKLCLSCNTIRGIYKISALK

SEQ ID NO: 285629 - protein, 153 aa, Glycine max
  Clone ID: PAT_MRT3847_99952C.1.pep
NSARGELVLWNPSIGVYKRLPFSDEYDLINGYLYGFGYDISTDDYLLILICLGAYALFFSFKTNSWSRVDLHARYVDPDSEFQAGTLFSGAFHWLVFSNCIVEHDDLPFSFEEYVPFIIAFDLTQRSFTEIPLFDHFTEEKLEIYSLRVMGGC

SEQ ID NO: 285630 - protein, 126 aa, Glycine max
  unsure (1)..(126): unsure at all Xaa locations
  Clone ID: PAT_MRT3847_99953C.1.pep
SRVRPPVWTKHGMSKEAGMIEGLCGGEENLMHDRTHLLETGWSRVAICXKDVWRAGWGIPSGSPVPVVCGNIFNEKLIGASYDXLLHQAEAASLDIHSLKDAGSLRVYGDDYLVGDAEYETPYFKG

SEQ ID NO: 285631 - protein, 55 aa, Glycine max
  Clone ID: PAT_MRT3847_99954C.1.pep
VSVIFMTGPAQSKSIMWATPSLPILWSTIPRIHRASSTAVSQFAIISSSLGARFA

SEQ ID NO: 285632 - protein, 93 aa, Glycine max
  Clone ID: PAT_MRT3847_99955C.1.pep
FPLFVTVILVITWHLSQTSTTTKEVVISLPTGINLLVTSGPPNPRPDSVRLVVWSCSAPSPCFRPKYERFDKFWFSKHQCSPIIYARVSIPRQ

SEQ ID NO: 285633 - protein, 82 aa, Glycine max
  Clone ID: PAT_MRT3847_99956C.1.pep
TGTDEVRQWTIRTGTKAPQAAGVIHGDFEKTFIQAIVYNYSALKEEGDEATLKAKGKIMTKGKDYVVEDGDVLLIKAGAAKA

SEQ ID NO: 285634 - protein, 237 aa, Glycine max
  unsure (1)..(237): unsure at all Xaa locations
  Clone ID: PAT_MRT3847_99957C.1.pep
MKGGTVQISWHDGKPVLTLDFHPHSATLATAGADFDIKFWQIKPAGSPKKLPVVSYLSNLSYHSSAVNVIRFSSSGELLASGADGGDLIIWKLHSTDAGQTWKVLXDVTWSTDATYIISGSVDNCCIIWDVNKGTNLQTLDTHAHYVQGVAWDPLGKYVTSLSSDRTCRIYMNKPHKSKGIEKXNYVCQQVISRADQPLFKNSKENKFHLFHDETLPSFFRRLAWSPDGSFLLGPAG

SEQ ID NO: 285635 - protein, 591 aa, Glycine max
  Clone ID: PAT_MRT3847_99958C.1.pep
MKGGTVQISWHESKPVLTLDFHPLSATLATAGADFDIKFWQIKPAGSPKKLPVVSYLSNLYYHSSAVNVIRFSSSGELLASGADGGDLIIWKLHSTDAGQTWKVLKMLRSHHKDILDLQWSTDATYIISGSVDNCCIIWDVNKGTNLQTLDAHAHYVQGVAWDPLGKYVTSLSSDRTCRIYMNKPHKSKGIEKINYVCQQVISKADQPLFKNSKETKFHLFHDETLPSFFRRLAWSPDGSFLLVPAGSYKISTASESVNAAYIFSRKDLSRPAIQLPCASKAVVAVRFCPIFFKLRGTNSAGLFKFPYRIIFAVATLNSLYIYDTESTSPIAVLAGLHYAAITDITWSSDAHYLALSSQDGFCSLVEFENDELGSPYSLSEGKVSNKDGRSTVQTTNDTVTVPTGNVSAVLAESKKMESEDTADDVVIEASGNIGAVVTESGKTVTQEKAGMIQSTGNLADFRKNEAAGKAVYMVIEATGDVGGVIADSRKNEAEEKTDDMVIETTGSIDAAELDRRKAEPEDKAEKQPANLDSDGKQAEAKEKTKTLQSSLDGIKSGAEEKAGPQLFNPKSTPISNKPAKKRITPTAIDP

SEQ ID NO: 285636 - protein, 186 aa, Glycine max
  Clone ID: PAT_MRT3847_99959C.1.pep
MASLKVACVVAVMCMVVVAMSAAPMAQAAITCGQVAGDMSPCFSYLRSGGKPSQACCNGVKSLSSAAKTTADRQGACSCLKNLVINMEHYLKPSNNNLSSINPQPWCFLSTKASAFLLRFSFSSWPSVFLLFLTPFSTLKQRIPLGTFFRLKKVCIFFPLPMLLDLPDYYAFFFGPANLINLYLKY

SEQ ID NO: 285637 - protein, 40 aa, Glycine max
  Clone ID: PAT_MRT3847_9995C.1.pep
IKPFWSIIWNYGCFLPSFLANLCSKKRFLQLKLKRTLFGF

SEQ ID NO: 285638 - protein, 139 aa, Glycine max
  Clone ID: PAT_MRT3847_99960C.1.pep
VFVTMKVMKKGKRPSHSGEKKKNKRNREQNPDVEIIVATQNGNVDSANGMHVREAKKEKTSINKKRKSKDKNLVRKRKPKGQEVDLDEQSDGVVDNPHSKAEEIQGLDGHIDSDSGAAIKPCRSKKDKKKRKEVQDSPE

SEQ ID NO: 285639 - protein, 91 aa, Glycine max
  unsure (1)..(91): unsure at all Xaa locations
  Clone ID: PAT_MRT3847_99961C.1.pep
SLGRCITCTNKATLCXXXXCXTGAXGALXXWXALLLXQRXYTVHAXVXXIKDENETKHLEXXEXAKSRLHFFEMDLLDIDSIAAXIKGXSG

SEQ ID NO: 285640 - protein, 202 aa, Glycine max
  unsure (1)..(202): unsure at all Xaa locations
  Clone ID: PAT_MRT3847_99962C.1.pep
IRHEPIPTEATTTSYPSLVEVVDKGNAGLIVTGSTTKDKKTGKDLFYNESTVFIRGSGGFGGAKKGSDRGAATRVYKMPQRAPDAVVEEKTTEEQAAIYRLSGDRNPLHIDPEFSKVGGFKEPILHGLCSFXIAGKAVVRTYGQFKNIKVRFAGVVIPGQTLVTELWKEGNVVLFQTKVKETGKLCIGGAGAELAAAGKSKL

SEQ ID NO: 285641 - protein, 116 aa, Glycine max
  unsure (1)..(116): unsure at all Xaa locations
  Clone ID: PAT_MRT3847_99963C.1.pep
IHVKRHKFKLLIMLYFATCHWFLSITDGLYPNGYFEECPEPSESKGSTDTTPNGIXHCTISGMAAYIQSLANQGDMALDVPHGTYADRLATEASIKQKIPIANGMFYSLTFIASRT

SEQ ID NO: 285642 - protein, 43 aa, Glycine max
  Clone ID: PAT_MRT3847_99964C.1.pep
MWVFPFLLYSLFLGDLLSLYSSSTNQTHIYILTYLSILFIQFL

SEQ ID NO: 285643 - protein, 76 aa, Glycine max
  Clone ID: PAT_MRT3847_99965C.1.pep
FTLYGSIFFHLVILINCVVNIVLNISLMKHWAKAIKKASGVMFPKEVMPNFFPCRNFKFFYLFSPFRHGSFLSSSR

SEQ ID NO: 285644 - protein, 40 aa, Glycine max
  unsure (1)..(40): unsure at all Xaa locations
  Clone ID: PAT_MRT3847_99966C.1.pep
XGXYXXQVEQVGNXEXVWFGXXSFXGFVEFKPRXXXNXXM

SEQ ID NO: 285645 - protein, 157 aa, Glycine max
  Clone ID: PAT_MRT3847_99967C.1.pep
IFFSYYYNWNSIFTPKKWISTFFSKSNPRFFLFLYNLYVWEYESIFLFLRNKSSKLRLKYFRVFFERIFFYEKIEHLVEVSVKDCSYTLSFFKDTFMHYVRYQGKSILVSKNTPLLINKWKYYFIYLWQCHFDIWSRPGTIHINQLSQHSFHFLGYF

SEQ ID NO: 285646 - protein, 39 aa, Glycine max
  Clone ID: PAT_MRT3847_99968C.1.pep
YLSILRRNACIILSKPGVFFFSCDVFKNKEEFSVACQQH

SEQ ID NO: 285647 - protein, 50 aa, Glycine max
  Clone ID: PAT_MRT3847_99969C.1.pep
AATTNRLLEKALSTSAAIISELEKKKQKKKEEQQRLNEDGAAIAEALALH

SEQ ID NO: 285648 - protein, 96 aa, Glycine max
  Clone ID: PAT_MRT3847_9996C.1.pep
NKFAKKKSYAFPLNFFCPCFTAKKHPTKKPFFSFVGRKKKKTLLFKGGPKTWGSPPGTGSFPISPLVNRVPPQGGKRISANMLENMPSKNYTFGKP

SEQ ID NO: 285649 - protein, 57 aa, Glycine max
  Clone ID: PAT_MRT3847_99970C.1.pep
FNNPDNSFSFNHFHLNKFSTSITFSPIQNITPTFYTNINSSFKCDFHTCQKFYYILP

SEQ ID NO: 285650 - protein, 49 aa, Glycine max
  Clone ID: PAT_MRT3847_99971C.1.pep
YSLIVEDTLCYDLLITYVEQNIIKLPKRRGIWKELQHLLRLTHFSIFSV

SEQ ID NO: 285651 - protein, 105 aa, Glycine max
  Clone ID: PAT_MRT3847_99972C.1.pep
ARFSFSPRKREGGLFRGARGIFLIGNLGSPPGAGRDFPGEPGGPPFGAVGFCEKEGGLPPFFTFVFPKEDGVFPFVFRVFGHPGAGFFAFQTRNLLISKPPLGGL

SEQ ID NO: 285652 - protein, 50 aa, Glycine max
  Clone ID: PAT_MRT3847_99973C.1.pep
PLVCSVVSCDFYHCLLIIQNGCSADGKSMFKAITFVHKQSTRVFKALRQC

SEQ ID NO: 285653 - protein, 56 aa, Glycine max
  Clone ID: PAT_MRT3847_99974C.1.pep
YLLEFLKWCPITFSQEMLKLMVCLDQLTLSCKANWMHLFMTKNSLTSGWQLAVTNG

SEQ ID NO: 285654 - protein, 74 aa, Glycine max
  unsure (1)..(74): unsure at all Xaa locations
  Clone ID: PAT_MRT3847_99975C.1.pep
KNYGGENWGVLGCFWVQKNAGIIXGEGGINYFFSDPRKRVSEPLVSARVKGLNRVFNVSFLSAKRVLIKRGLGF

SEQ ID NO: 285655 - protein, 87 aa, Glycine max
  Clone ID: PAT_MRT3847_99976C.1.pep
CLMVENRPLGKEKFPGPTLVLLTGSLTELKEPFVTSLDIKNMVGTRDHFKRVLVIHLQKENGTLVAQNKILFRCSRKLLTPKKDRTP

SEQ ID NO: 285656 - protein, 110 aa, Glycine max
  Clone ID: PAT_MRT3847_99977C.1.pep
IHGFMVTHNIILLDKEGQKQVNRPHIQSDTGHVNNCNKHPGEGNNPHPKAKRGHHKPPTGRRTDKPETRLNYRHPPSEGKTKGHKNQRAIFEQSESCPPEPKTRIQTPGC

SEQ ID NO: 285657 - protein, 117 aa, Glycine max
  Clone ID: PAT_MRT3847_99978C.1.pep
HTGHVNKDQDAEAKTRSSLGLPSNDKDPQQMNHSVLEDTPFITLINLIGQQLFGWPFYLIFNSSGQVYDGRWTNHFNPNSPIFDPKNFVDVIIFDIGIIMGSSTIGDFSYVYSLIVV

SEQ ID NO: 285658 - protein, 59 aa, Glycine max
  Clone ID: PAT_MRT3847_99979C.1.pep
SPTFGLLGLTTNQTKTLKAQWVLNNTTPVSSKKTLTTTTTNFMRTGTSKKKTTTFLSNT

SEQ ID NO: 285659 - protein, 131 aa, Glycine max
  Clone ID: PAT_MRT3847_9997C.1.pep
CSPCPHRKDCFLGGCVWGVPPQPHGSPPPLGSLKSQGGGVLPSSLGGGCFLKKSCFFPPSVSPFPGFEIGPMEDPPKRGFLGLFFRRGPLFSQSPPGVGLNKFPLLYTGPFVFFKNLLPPVFLNKAFVVFF

SEQ ID NO: 285660 - protein, 89 aa, Glycine max
  Clone ID: PAT_MRT3847_99980C.1.pep
MANRWLRPEVYPLFAAVGAAVGICGFQLVRNICINPEVRVNKEGRKAGVLENFAEGEKYAEHFLRKYVRNRTPEIMPSINSFFADTSRN

SEQ ID NO: 285661 - protein, 54 aa, Glycine max
  unsure (1)..(54): unsure at all Xaa locations
  Clone ID: PAT_MRT3847_99981C.1.pep
XXGXPIPALWRXXCXXMTXVXLLFIXXXCSLRHXARXXAEFXAXVRXREIXXXW

SEQ ID NO: 285662 - protein, 89 aa, Glycine max
  Clone ID: PAT_MRT3847_99982C.1.pep
MANRWLRPEVYPLFAAVGAAVGICGFQLVRNICINPEVRVNKEGRKAGVLENFAEGEKYAEHFLRKYVRNRTPEIMPSINSFFADPSRN

SEQ ID NO: 285663 - protein, 135 aa, Glycine max
  unsure (1)..(135): unsure at all Xaa locations
  Clone ID: PAT_MRT3847_99983C.1.pep
AGVGLESXSIFNVTTGEVXXYHGAISYLLQDQDGQIIHPHSIAAGMEYPGVGPELSFLKESGRAEFCVANDEEALEAYQRLCKLEGIFPSLEAAHALAILDKLVPTLCNGTKVVVNCSGRGDKDAAIVFNRGIYI

SEQ ID NO: 285664 - protein, 155 aa, Glycine max
  unsure (1)..(155): unsure at all Xaa locations
  Clone ID: PAT_MRT3847_99984C.1.pep
LFPSTNAQPYAQLLTQPTYPFTIPSRSPAYRPPPRLLTMRAVLPLSSKDAAEETVLASIQNCSYFDGILSDGYTFNPLHTSWTTLNQTTQLTAVTNMLLYNASQGSPCETLNPCMTVMNXWLLLRSVEILYSLRPYRNCHNEKKLCDTGFTGAVY

SEQ ID NO: 285665 - protein, 108 aa, Glycine max
  unsure (1)..(108): unsure at all Xaa locations
  Clone ID: PAT_MRT3847_99985C.1.pep
DSSYDVISNMALPSIAVXFTGKALVVVSRSVSKLXEVDXQVYRSVVRASKVVLFQVTPHTLQFXVQVVKSYDTNLFWRQSRSVRKVMFASIAWSHALYRVWSPLVLPG

SEQ ID NO: 285666 - protein, 426 aa, Glycine max
  unsure (1)..(426): unsure at all Xaa locations
  Clone ID: PAT_MRT3847_99986C.1.pep
MVLEESVVHDVRLSSVGPGRATGSDVFHNPGGLDLAMKLHYLRVVYFFDSEAAQDLTIMKIKDGMFTLFNHYFITCGRFRRSDSGRPLIKCNDCGARFIEAKCNKTLDEWLAMKDWPLYKLLVSHQVIGPELSFSPPVLFQVTKFKCGGISLGLSWAHVLGDPLSASEFINSWGLILKNMGLKMLFNIPRSIPTPGQPGPEKDPVSAKRIDPVGDHWIPANNKKMETFSFHLTSSHTNLGFGSSLDQTLESLCAMIWRCMGRMARVRSGSEPKTVTVCRGQXHIIGNNQVICKVDAASESSILDTDLTVLASMLVDQGVDERKQIEEAVERDQGVSDFFVYGVNLTFLDLQETNVYDLQLKGHTPKFVYYTLQGVGDEGVVLVYPLPKGSMENGVDGKFLTMIFPEDEMVKLKSELKIIGLLLENN

SEQ ID NO: 285667 - protein, 49 aa, Glycine max
  Clone ID: PAT_MRT3847_99987C.1.pep
SKNGYYFCPLTSKASPTIYVDIRAKMEQSYPLHVGYEILKAHPKFPAHF

SEQ ID NO: 285668 - protein, 434 aa, Glycine max
  unsure (1)..(434): unsure at all Xaa locations
  Clone ID: PAT_MRT3847_99988C.1.pep
MVLEECVVHDVRLSSVGPGRATRSEVFHSPGGLDLAMKLHYLRVVYFFASEAAQDLTIMKIKEAMFTLLNHYFITCGRFRRSDSGRPLIKCNDCGVRFIEAKCSXTLDEWLAMKDWPLYKLLVSHQVIGPELSFSPPVLLQVTKFKCGGISLGLSWAHVLGDPLSASEFINSWGLILKNMGLQQLFNIPRSIPTPRQPGPEKDPVSAKRVDPVGDHWIPANNKKMDTFSFHLTSSQLNYLQAQIWGPSLDQTPLFESLCAMIWRCMARVRSGSEPKTVTVCRTDPYKRSNDIIGNNQVICKVEVESECSIVDTDLTILASMLVDQGVDERKQIEEAIEKDQGVSDFFVYGVNLTFLDLEDTNVYDLQLKGHTPKFVYYTLQGVGDEGIVLVYPWPKGSIENGVDGKFVTMIIPEDEMVKLKSELKIIGLLLEDN

SEQ ID NO: 285669 - protein, 197 aa, Glycine max
  Clone ID: PAT_MRT3847_99989C.1.pep
VGYLLGLGDRHPSNLMLHRFSGKILHIDFGDCFEASMNREKFPEKAFVHDPLINWRLFNFNEVPQMSMLTSNHVPPVVNSEESAPNRELPHPQRGARERELLQAVNQLGDANEVLNERAVVVMARMSNKLTGRDFSTCSSVSNNSLQHAVDHSSLISGDTREVDHALSVKLQVQKLIIQASSHENLCQNYVGWCPFW

SEQ ID NO: 285670 - protein, 52 aa, Glycine max
  Clone ID: PAT_MRT3847_9998C.1.pep
NLWNFSEPLLYIGEELWVEVVVKNILYCESRKKSLTPLLKNGELGWWELGKI

SEQ ID NO: 285671 - protein, 53 aa, Glycine max
  Clone ID: PAT_MRT3847_99990C.1.pep
VILLCNKQGGGNQKKIASPPHFGPWECSNGNSLLQPLCTSYLVRQGLNSGQLM

SEQ ID NO: 285672 - protein, 50 aa, Glycine max
  Clone ID: PAT_MRT3847_99991C.1.pep
NNATQLVKPHSKDEIIFLKKQAHMFSHTKNFVNLTFGGKTQSGKIWFYTK

SEQ ID NO: 285673 - protein, 47 aa, Glycine max
  Clone ID: PAT_MRT3847_99992C.1.pep
SKYQTCNNRSRQNNLTKHGSRITDITQFHYYNTTYCLFFFNKKQVLV

SEQ ID NO: 285674 - protein, 101 aa, Glycine max
  unsure (1)..(101): unsure at all Xaa locations
  Clone ID: PAT_MRT3847_99993C.1.pep
STKAQFVXGITLNHRITGAGSHXSSEDFPEKEDQEKPKKIDARSRHSIYPQYNEVNAQRETNLLKSSIEDVATPKGSMLDLKHSQFKHLHFAKTTFCWNHS

SEQ ID NO: 285675 - protein, 43 aa, Glycine max
  Clone ID: PAT_MRT3847_99994C.1.pep
ANYRRVRQSLNYDGGRAGRALRTLCLKTVGMCPRHTHTKGHIN

SEQ ID NO: 285676 - protein, 415 aa, Glycine max
  Clone ID: PAT_MRT3847_99995C.1.pep
MATLSDHRRRMLPPENVDAQPITSDSVSNNHRTTHRRDAGNNGLRHRLVRQESLRRNIEHVAAETYLVSRLAFTLLRYLGIGYRWITQLLALGCYAMLLMPGFLQVAYYYFFTSKVKRSIVYGDQPRNRLDLYLPANIGEPKPVLIFVTGGAWIIGYKAWGSLLGLQLAERGIMVACIDYRNFPQGTISDMVNDTSRGISFIINNIANYGGDPNRIYLMGQSAGAHISSCALLEQAARESEKEDSVSWSISQLKAYLGLSGGYNLLDLVDHFQNRGLDRSIFLSIMEGENSLKEFSPEIKIQDPCLKSSIPHFPPVYLVHGTADYSIPSVASERFAEALKKAGVRAELILYEGKTHTDLFLQDPLRGGKDDLFDLAVAIMHSNDSDALANDAIAPPRRRFVPEILLKLARKISPF

SEQ ID NO: 285677 - protein, 49 aa, Glycine max
  Clone ID: PAT_MRT3847_99996C.1.pep
PTIKPIFKARLGFNTRIILHPYLIFIIYISYPLTSHKLLISHSQNITKS

SEQ ID NO: 285678 - protein, 260 aa, Glycine max
  Clone ID: PAT_MRT3847_99997C.1.pep
HASADAWVLTGLNPLECFVHSVTNRDSSFSDHADLPGTLTRRLMFFMRDLHDAYDGTVRNLYGNQLIQFSYDIEEDSSCDKGFQEYAIGGEPVGAISACAISEAAYSALGQPVSLLETSPLLNLKNVLECGSRKRNGDQTVSLFLSEKLGKQRHGFEYAALEVKNYLERLLFSNIVSTVMIIFTPHDGSSQEKYSPWVCHFHLDKEIVTRRKLKVHSIIDSLYQRYYSQRKDSKVCFTNLKISSRSVLLIPWLRKVKTLL

SEQ ID NO: 285679 - protein, 88 aa, Glycine max
  Clone ID: PAT_MRT3847_99998C.1.pep
TINIAVLNKSFTASISNLFQATQTHQRTDEKNTELINIPVNGEKIQNIERVKRQNVKCESMKRRRWVWLKSRKVSNLVKRLNWVERKR

SEQ ID NO: 285680 - protein, 89 aa, Glycine max
  Clone ID: PAT_MRT3847_99999C.1.pep
LSQTKDRAKRLSNRGNGSALPKQSASRGGSPVSLIHEPGQVCRFLVAQCANDASCMLALLFRQPVHSFKSFMRVRCICLRAEDKHPQVT

SEQ ID NO: 285681 - protein, 64 aa, Glycine max
  Clone ID: PAT_MRT3847_9999C.1.pep
KNYFIPRVYLYLFFNDKLKILRGRNDISVSKSTSMSRPTPGSDYLINVCSTPNSLMSNHDHSAV

SEQ ID NO: 285682 - protein, 132 aa, Glycine max
  unsure (1)..(132): unsure at all Xaa locations
  Clone ID: PAT_MRT3847_999C.1.pep
TVRTPFXFDSSKQSFXQFSIDLLXGGILADKTGDWITLIQNSPIINLXLRVAALKKGXXMDKIVMSANAAXKGSDCASLVQVFLTNTHSTEPFDACKWTKSEPHXSWELIFPIKVCGANNGSKMWESEWKNQ

SEQ ID NO: 285683 - protein, 99 aa, Glycine max
  Clone ID: PAT_MRT3847_99C.1.pep
TRKRKEKTKKERSDLLFFLVLNVTQSDRQLHDHNRLWRAERRVERKEPKKIIGMGGIGKRINNTTINHRDAVILYRPSHLPSLPQALLPFPFSLYQYRT

SEQ ID NO: 285684 - protein, 54 aa, Glycine max
  Clone ID: PAT_MRT3847_9C.1.pep
CTKYHQPQTEHSRRVGIYSVSTFSPFGIFVFKDRSPSHSPSSLFLLMFHHLESC
